(19) United States
(12) Patent Application Publication
(10) Pub. No.: US 2025/0327096 A1
(43) Pub. Date: Oct. 23, 2025

(54) METHOD FOR ENHANCING GROWTH OF DUNALIELLA SPECIES AND BIOMASS PRODUCTION THEREFROM

(71) Applicant: THE HONG KONG POLYTECHNIC UNIVERSITY, Hong Kong (CN)

(72) Inventors: Hang-kin KONG, Hong Kong (CN); Chun-Lap Samuel LO, Hong Kong (CN); Sirius TSE, Hong Kong (CN); Wing-Tak WONG, Hong Kong (CN); Ka Fu YUNG, Hong Kong (CN)

(21) Appl. No.: 18/642,902

(22) Filed: Apr. 23, 2024

(51) Int. Cl. C12P 1/00; C12N 1/12; C12N 1/20; C12P 39/00; C12R 1/01; C12R 1/89

(52) U.S. Cl. CPC C12P 1/00; C12N 1/125; C12N 1/205; C12P 39/00; C12R 2001/01; C12R 2001/89

(57) ABSTRACT

A method for enhancing growth of a microalgal species and its biomass production yield by co-cultivating the microalgal species with a bacterial isolate under the genus of Pseudoalteromonas in separate compartments. The microalgal species is selected from Dunaliella species. The genome sequence of the Pseudoalteromonas isolate can have a nucleotide similarity of lower than 95% to that of other Pseudoalteromonas species.

### REFERENCE TO SEQUENCE DISCLOSURE

[0001] A sequence listing file with a file name “P25477US00_sequence_listing.xml” in ST.26 XML file format having a file size of 4,455 KB created on Sep. 13, 2023 is incorporated herein by reference in its entirety.

### REFERENCE TO A DEPOSIT OF BIOLOGICAL MATERIAL

[0002] This application contains a reference to a deposit of biological material, which deposit is incorporated herein by reference.

### TECHNICAL FIELD

[0003] The present disclosure relates to a method for enhancing the growth rate and yield of biomass from Dunaliella spp. In particular, the method includes co-cultivating the Dunaliella spp. with a novel Pseudoalteromonas isolate.

### BACKGROUND

[0004] Microalgae are well-known species that can produce useful biomass and extracts. Among which, marine microalga, Dunaliella spp., has been used commercially to produce feedstock for farmed animals, biofuel production, and also as a dietary supplement (e.g., beta-carotene) as it is one of the few species recognized by the FDA as Generally Recognized as Safe (GRAS). It is also believed that microalgal cultivation can lower CO₂ emission. Therefore, methods for enhancing the growth and yield of Dunaliella spp. and biomass production has drawn a lot of attention.

[0005] However, the traditional way to boost the growth rate of microalgae usually involves using high concentrations of substrate in the culture medium which costs more than regular growth. Separation of useful materials from other materials in a more condense microalgal culture is another issue as the traditional separation process is normally labor-intensive or low yield of biomass which might not justify the high operational cost.

[0006] Some studies suggested optimizing the culture conditions, such as CO₂ content, light intensity and wavelength for Dunaliella spp. to increase the biomass yield and change the composition of the by-products (Jeon et al., “Enhanced production of biomass and lipids by supplying CO₂ in marine microalga Dunaliella sp.” J Microbiol. 51, 773-776 (2013); Sui et al., “Effect of Light Intensity and Wavelength on Biomass Growth and Protein and Amino Acid Composition of Dunaliella salina.” Foods 2021, 10(5), 1018).

[0007] Some other studies proposed that co-culture of microalgae with other genus of microbes such as yeast or bacteria, or even with a different microalgal species may enhance the growth and yield of biomass from the microalgal culture. For instance, a mutualistic microalga-bacteria consortium is based on the exchange of resources and services between two different types of microbes, i.e., the bacteria utilize the organic carbon and dissolved oxygen released from algal photosynthesis, in return, supply nutrients, vitamins, trace elements and carbon dioxide for microalgal growth. They co-exist and have symbiotic interactions with each other. It has been found that some microalgae show higher interaction with bacteria than the others. For instance, Samo et al. (Attachment between heterotrophic bacteria and microalgae influences symbiotic microscale interactions. Environ. Microbiol. 2018, 20, 4385-4400) reported that Phaeodactylum tricornutum had attached bacteria and fixed 64% more carbon than axenic cells, whereas Nannochloropsis salina had only 42-63% of the cells associated with bacteria and just fixed 10% more carbon compared to axenic cells. They also showed that an uncultured bacterium related to Haliscomenobacter sp. increased carbon fixation in P. tricornutum and incorporated 71% more fixed C than other bacteria.

[0008] In addition, the co-cultivation parameters, such as number of individual populations, degree of separation among different populations, volume of cultures, timeline of the co-cultures, etc. would directly impact the outcome of the interaction. Approaches of co-cultivation would also affect the efficiency of the co-cultivation. For instance, one of the most commonly used setups in co-cultivation studies is suspension. Other common experimental designs include immobilizing one type of microbes as biofilms while suspending the others in a vessel, using different carriers to encapsulate different microbes, or separation of two different microbes by a membrane. Through careful selection of two different species or strains not interacting or co-existing in nature and optimizing the co-cultivation conditions for the selected species/strains, a synthetic mutualism is achievable in order to enhance the growth of the target species/strain in a well-controlled and sustainable manner. Besides co-cultivation, extracts from one of the microbes can be a source of growth factors to enhance the growth of other microbes.

[0009] There thus exists a need to developed improved methods for cultivating Dunaliella spp. that address or overcome at least of the shortcomings addressed above.

### SUMMARY

[0010] Accordingly, an aspect of the present disclosure proposes a method for co-culturing a microalgal species under a genus of Dunaliella with a bacterial strain under a genus of Pseudoalteromonas in a confined co-cultivation environment to enhance growth of the microalgal species comprising providing the microalgal species and the bacterial strain to the confined co-cultivation environment, providing a culture medium to the confined co-cultivation environment and a set of co-cultivation conditions.

[0011] In certain embodiments, the microalgal species comprises Dunaliella tertiolecta (CCMP364 isolated from Norway or CCMP1320 with unknown origin) or a species named STK2. STK2 is a Dunaliella sp. isolated from Sha Tau Kok, Hong Kong in 2013.

[0012] In certain embodiments, the bacterial strain comprises an isolate under the genus of Pseudoalteromonas having a genome sequence composed of two circular DNAs represented by SEQ ID NOs: 1 and 2, respectively.

[0013] In certain embodiments, the bacterial strain further comprises any species under the genus of Pseudoalteromonas having a genome sequence with a nucleotide similarity of at least 90% to SEQ ID NOs: 1 and 2.

[0014] In certain embodiments, the species having the genome sequence with the nucleotide similarity of at least 90% to the genome sequence of the isolate comprises Pseudoalteromonas shioyasakiensis, Pseudoalteromonas gelatinilytica, or Pseudoalteromonas piscicda.

[0015] In certain embodiments, the bacterial strain comprises the Pseudoalteromonas having been deposited with the American Type Culture Collection under Patent Deposit Designation Number PTA-127701.

[0016] In certain embodiments, the confined co-cultivation environment comprises at least two compartments each accommodating the microalgal species or the bacterial strain, and the compartment accommodating the bacterial strain is configured to be permeable to substances of less than 10 kDa in molecular weight between the two compartments accommodating the microalgal species and the bacterial strain, respectively.

[0017] In certain embodiments, the culture medium comprises silicate-free K medium or L1 medium.

[0018] In certain embodiments, the set of co-cultivation conditions comprises culture temperature is 22-23° C. Light intensity is 7-8 μmole m−2 s−1, under a 12:12 h light:dark cycle. Partial pressure of CO₂ is 400 ppm.

[0019] In certain embodiments, the microalgal species and the bacterial strain are provided in a cell density of 1:1000.

[0020] A further aspect of the present disclosure provides an algal growth enhancing composition comprising a biological agent or an extract thereof, where the biological agent comprises a genome sequence composed of two circular DNAs represented by SEQ ID NOs: 1 and 2, respectively, or any genomic sequence having a nucleotide similarity of at least 90% to the genome sequence represented by SEQ ID NOs.: 1 and 2.

[0021] In certain embodiments, the biological agent is a bacterial strain under a genus of Pseudoalteromonas.

[0022] In certain embodiments, the bacterial strain comprises Pseudoalteromonas shioyasakiensis, Pseudoalteromonas gelatinilytica, Pseudoalteromonas piscicda, or any Pseudoalteromonas spp. comprising a genomic sequence having a nucleotide similarity of at least 90% to the genome sequence represented by SEQ ID NOs: 1 and 2.

[0023] In certain embodiments, the bacterial strain comprises the Pseudoalteromonas having been deposited with the American Type Culture Collection under Patent Deposit Designation Number PTA-127701.

[0024] In certain embodiments, the algal growth is a growth of microalgal species under a genus of Dunaliella.

[0025] In certain embodiments, the microalgal species comprises Dunaliella tertiolecta (CCMP364 isolated from Norway or CCMP1320 with unknown origin) or a species named STK2. STK2 is a Dunaliella sp. isolated from Sha Tau Kok, Hong Kong in 2013.

[0026] In certain embodiments, the extract of the biological agent comprises a culture medium, cellular and molecular contents of the biological agent.

[0027] In certain embodiments, the extract has a molecular weight of less than 10 kDa.

[0028] A further aspect of the present disclosure provides a method for increasing biomass production yield from a microalgal species comprising co-culturing the microalgal species with a bacterial strain under a genus of Pseudoalteromonas, wherein the bacterial strain comprises a genome sequence composed of two circular DNAs represented by SEQ ID NOs: 1 and 2, respectively, a genome sequence having a nucleotide similarity of at least 90% to the genome sequence represented by SEQ ID NOs: 1 and 2, or the bacterial strain comprises the Pseudoalteromonas having been deposited with the American Type Culture Collection under Patent Deposit Designation Number PTA-127701. Alternatively, the method for increasing the biomass production yield from the microalgal species comprising contacting the microalgal species with an extract of the bacterial strain described herein, where the extract comprises a culture medium, cellular and molecular contents of the bacterial strain.

[0029] In certain embodiments, the microalgal species comprises Dunaliella tertiolecta (CCMP364 isolated from Norway or CCMP1320 with unknown origin) or a species named STK2. STK2 is a Dunaliella sp. isolated from Sha Tau Kok, Hong Kong in 2013.

[0030] In certain embodiments, the bacterial strain comprises Pseudoalteromonas shioyasakiensis, Pseudoalteromonas gelatinilytica, Pseudoalteromonas piscicda, or any Pseudoalteromonas spp. comprising a genomic sequence having a nucleotide similarity of at least 90% to the genome sequence represented by SEQ ID NOs: 1 and 2.

[0031] In certain embodiments, the bacterial strain comprises the Pseudoalteromonas having been deposited with the American Type Culture Collection under Patent Deposit Designation Number PTA-127701

[0032] In certain embodiments, said co-culturing is performed in a confined co-cultivation environment.

[0033] In certain embodiments, the confined co-cultivation environment comprises at least two compartments each accommodating the microalgal species or the bacterial strain, and the one accommodating the bacterial strain is configured to be permeable to substances of less than 10 kDa in molecular weight between the two compartments accommodating the microalgal species and the bacterial strain, respectively.

[0034] In certain embodiments, the extract has a molecular weight of less than 10 kDa.

[0035] A further aspect of the present disclosure provides a co-culture system comprising a microalgal species under the genus of Dunaliella and an isolate of bacterial strain under the genus of Pseudoalteromonas, where the isolate of bacterial strain under the genus of Pseudoalteromonas comprises a genome sequence composed of two circular DNAs represented by SEQ ID NOs: 1 and 2 or the bacterial strain comprises the Pseudoalteromonas having been deposited with the American Type Culture Collection under Patent Deposit Designation Number PTA-127701.

[0036] This summary is provided to introduce a selection of concepts in a simplified form that are further described below in the Detailed Description. This Summary is not intended to identify key features or essential features of the claimed subject matter, nor is it intended to be used as an aid in determining the scope of the claimed subject matter. Other aspects of the present disclosure are disclosed as illustrated by the embodiments hereinafter.

### BRIEF DESCRIPTION OF DRAWINGS

[0037] The appended drawings, where like reference numerals refer to identical or functionally similar elements, contain figures of certain embodiments to further illustrate and clarify the above and other aspects, advantages and features of the present invention. It will be appreciated that these drawings depict embodiments of the invention and are not intended to limit its scope. The invention will be described and explained with additional specificity and detail through the use of the accompanying drawings in which:

[0038] FIG. 1 shows the result of phylogenetic analysis between the Pseudoalteromonas isolate (ATCC Patent Deposit No. PTA-127701) of the present disclosure and other 37 species under the genus of Pseudoalteromonas based on their genomic DNA sequences for 12 Pseudoalteromonas spp. and long scaffolds (or assembles of long DNA sequences) for the remaining 25 species, where the arrow indicates where the present Pseudoalteromonas isolate (psl_c) is located in the phylogenetic tree, and the solid line box indicates the two closest relatives, P. shioyasakiensis and P. gelatinilytica;

[0039] FIG. 2 shows an average nucleotide similarity of the genomic data of 14 closer Pseudoalteromonas spp. to the present Pseudoalteromonas isolate (ATCC Patent Deposit No. PTA-127701) among the 37 species analyzed as shown in FIG. 1, where the percentage of similarities shown are based on BLASTn alignment; the solid line box indicates that none of the genome of 14 Pseudoalteromonas would have nucleotide similarity of >95% (indication of the same species) to the present Pseudoalteromonas isolate;

[0040] FIG. 3A shows the dose-response effect of living Pseudoalteromonas isolate (ATCC Patent Deposit No. PTA-127701) on microalgal density (cell count per ml) of D. tertiolecta CCMP364 after co-culturing for 14 days, where 1 unit=microalgae-bacteria ratio 1:1000;

[0041] FIG. 3B shows a dose-response curve from 0.1 to 1 unit of the living present Pseudoalteromonas isolate (ATCC Patent Deposit No. PTA-127701) on the microalgal densities of CCMP364 after the co-culturing for 14 days as in FIG. 3A;

[0042] FIG. 4 shows a growth performance curve of D. tertiolecta CCMP364 co-cultivated with the present Pseudoalteromonas isolate (ATCC Patent Deposit No. PTA-127701, PS1) according to certain embodiments compared to that without co-cultivation (Control);

[0043] FIG. 5 shows growth performance curves of D. tertiolecta CCMP364 under the cultivation with 5 times-diluted medium (0.2×medium) and 5-times-diluted medium with the present Pseudoalteromonas isolate (ATCC Patent Deposit No. PTA-127701)(0.2×medium+PS1) compared to that without medium-dilution or co-cultivation (C);

[0044] FIG. 6A shows a growth performance curve of D. tertiolecta CCMP364 co-cultivated with the living present Pseudoalteromonas isolate (ATCC Patent Deposit No. PTA-127701) in a 90-L inoculum level (Live PS1) compared to that without co-cultivation in the same inoculum level (Control);

[0045] FIG. 6B shows a comparison in dried weight of the biomass obtained from the co-culture of D. tertiolecta CCMP364 and the present Pseudoalteromonas isolate (ATCC Patent Deposit No. PTA-127701) grown in the 90-L medium and the biomass obtained from the control culture of D. tertiolecta CCMP364 alone grown in the 90-L medium as in FIG. 6A;

[0046] FIG. 7 shows growth performance curves of D. tertiolecta CCMP364 co-cultivated with P. piscicda (ATCC-15057) and P. distincta (ATCC-700518), respectively, and compared to that without co-cultivation (Control); and

[0047] FIG. 8 shows a workflow of a method for enhancing the growth of Dunaliella spp. and yield of biomass production therefrom according to certain embodiments of the present invention.

[0048] Skilled artisans will appreciate that elements in the figures are illustrated for simplicity and clarity and have not necessarily been depicted to scale.

### DETAILED DESCRIPTION

[0049] It will be apparent to those skilled in the art that modifications, including additions and/or substitutions, may be made without departing from the scope and spirit of the invention. Specific details may be omitted so as not to obscure the invention; however, the disclosure is written to enable one skilled in the art to practice the teachings herein without undue experimentation.

[0050] The present disclosure proposes a cultivation method to increase growth rates and yields (dried biomass) of Dunaliella spp. by co-culturing with a novel Pseudoalteromonas isolate in a confined cultivation environment with at least two compartments separated by a permeable membrane, e.g., the Pseudoalteromonas isolate is accommodated in a semi-permeable vessel configured to be permeable to substances of certain molecular weight, such that the Dunaliella spp. and the isolate do not have physical contact with each other. The present method is more cost-efficient for culturing Dunaliella spp. and obtaining a higher yield of biomass since the costs for culture medium and separation the present Pseudoalteromonas isolate from Dunaliella biomass before harvesting have been significantly reduced.

[0051] In certain embodiments, Dunaliella tertiolecta (CCMP364 isolated from Norway or CCMP1320 with unknown origin), which is purchased from the National Collection of Marine Algae and microbiota (NCMA), is provided. In certain embodiments, a microalgal strain named STK2 (Dunaliella sp.), which was isolated from Sha Tau Kok, Hong Kong in 2013, is provided. It belongs to the genus of Dunaliella, but the species of this isolate has never been identified.

[0052] In certain embodiments, the Pseudoalteromonas isolate which was isolated from a blooming event in Tai Mei Tuk, Taipo, Hong Kong in August 2012 by repeated marine agar plate spreading is provided.

[0053] In certain embodiments, the Pseudoalteromonas isolate has a genome composed of two circular DNAs, where one of them has 3,646,986 bp while the other has 912,021 bp which are represented by SEQ ID NOs: 1 and 2, respectively.

### Deposit of Biological Material

[0054] The following biological material has been deposited under the terms of the Budapest Treaty with the American Type Culture Collection (ATCC®) Patent Depository, 10801 University Boulevard, Manassas, Virginia 20110 USA, and given the following accession number:

| | ATCC Patent | |
|---|---|---|
| Deposit | Deposit Number | Date of Deposit |
| Pseudoalteromonas sp. | PTA-127701 | Mar. 7, 2024 |

[0055] The strain has been deposited under conditions that assure that access to the culture will be available during the pendency of this patent application and any patent issuing therefrom to one determined by foreign patent laws to be entitled thereto. The deposit represents a substantially pure culture of the deposited strain. The deposit is available as required by foreign patent laws in countries wherein counterparts of the subject application, or its progeny are filed. However, it should be understood that the availability of a deposit does not constitute a license to practice the subject invention in derogation of patent rights granted by governmental action.

[0056] In certain embodiments, the bacterial strain under the genus of Pseudoalteromonas comprises the Pseudoalteromonas having been deposited with the ATCC under Patent Deposit Designation Number PTA-127701.

[0057] The following examples accompanied with corresponding drawings are intended to better illustrate various embodiments of the present invention. Scope of the present invention should be defined in the appended claims.

### EXAMPLES

### Example 1—Phylogentic Analysis and Genomic Sequence Comparison of Pseudoalteromonas Isolate (ATCC Patent Deposit No. PTA-127701) with Other Pseudoalteromonas spp.

[0058] The two circular DNA sequences (SEQ ID NOs: 1 and 2) were used to identify the taxonomy of the isolate by phylogenetic analysis. Genomic DNA sequences or assembles of long DNA sequences of 37 Pseudoalteromonas spp. obtained from NCBI genome database and the two circular DNAs of the present isolate are clustered by Cytree 3. The results are shown in FIG. 1. As seen from FIG. 1, it was suggested that the isolate belongs to the genus of Pseudoalteromonas. The two closest relatives to the isolate under the same genus are P. shioyasakiensis and P. gelatinilytica (indicated by the solid line box)

[0059] Then, the genomic sequence of the Pseudoalteromonas isolate (ATCC Patent Deposit No. PTA-127701) was compared with 14 other known Pseudoalteromonas species with complete genomic sequences to estimate average nucleotide similarities among them. The results are shown in FIG. 2, in which Pseudoalteromonas shioyasakiensis shares the highest nucleotide similarity (up to around 90%) to the Pseudoalteromonas isolate (ATCC Patent Deposit No. PTA-127701). Typically, two different bacterial isolates collected from two different sources are considered as the same species when their average nucleotide similarities of their genomes are higher than 95%. Thus, the Pseudoalteromonas isolate (ATCC Patent Deposit No. PTA-127701) was considered to be a novel species since there were around 10% differences between the genomic sequences of the isolate and its closest relative P. shioyasakiensis.

### Example 2—Co-Cultivation System of Dunaliella Spp. And Pseudoalteromonas Isolate (ATCC Patent Deposit No. PTA-127701)

[0060] As depicted in FIG. 8, the Pseudoalteromonas isolate (ATCC Patent Deposit No. PTA-127701) was first grown in LB medium prepared in synthetic seawater (29.9 g/L Instant Ocean seasalt, France) overnight to get a bacterial population density equivalent to OD600 around 1 (s801). The isolate was then collected by centrifugation and then washed with the synthetic seawater for 3 times to remove trace amount of bacterial culture medium (s802). Subsequently, the isolate was added into one of the compartments, e.g., in the semi-permeable vessel, which is only permeable to substances with a molecular weight of less than 10 k Da (s803). The semi-permeable vessel added with the isolate was inoculated with D. tertiolecta CCMP364 in either silicate-free K medium or L1 medium (detailed recipes of K and L1 medium are documented in NCMA web site) in a separate compartment (s804). In certain embodiments, an optimal microalgae-to-bacteria ratio of the present disclosure is 1:1000, derived from the most number of cells per mL of the cell culture as shown in FIG. 3A. It was defined as co-culturing 100 ml of the novel isolate (OD600 around 1) with 1 L of D. tertiolecta CCMP364 (10 k microalgae per ml of K medium). In this setup, the cell density of microalgae to bacteria was 1:1000. As seen from FIG. 3B, the microalgal density reached maximum when 1 unit of the novel isolate (ATCC Patent Deposit No. PTA-127701) was inoculated with D. tertiolecta CCMP364, whereas increasing dose over 1 unit did not further promote microalgal growth.

[0061] The yields of D. tertiolecta CCMP364 surprisingly increased with a range from around 40% to 3 folds in terms of microalgal densities, and around 20% to 5 folds in terms of dried microalgal biomass weight after 14 days post-inoculation (FIG. 4 and Table 1). The increases of the microalgal densities and dried microalgal biomass depended on the composition of the selected medium (Table 1). The growth enhancing effect of the present isolate (ATCC Patent Deposit No. PTA-127701) on the microalgae in the co-cultivation system was not just observed when using normal K medium, it was also observed when co-culturing D. tertiolecta CCMP364 with the isolate using 5-fold diluted K medium (FIG. 5). The scale of the co-cultivation between D. tertiolecta CCMP364 and the present isolate were further up-scaled from 1 L to 90 L. The microalgal density and dried biomass significantly increased after 21 days (FIGS. 6A-B). After the co-cultivation, the present isolate (ATCC Patent Deposit No. PTA-127701) could be easily separated from the microalgae by removing the semi-permeable vessel (s805) before harvesting the microalgal biomass (s806).

TABLE 1
The effects of the present Pseudoalteromonas isolate
(ATCC Patent Deposit No. PTA-127701) on the growth of three
Dunaliella species: CCMP364, CCMP1320 and STK2:

| | Live bacterium (medium added) | | | | | |
|---|---|---|---|---|---|---|
| | CCMP364 | CCMP364 | CCMP1320 | CCMP1320 | STK2 | STK2 |
| | (K | (L1 | (K | (L1 | (K | (L1 |
| | medium) | medium) | medium) | medium) | medium) | medium) |
| Cell | +327% | +42.8% | +298% | +56.3% | +1252% | +36.3% |
| number | | | | | | |
| (day 14) | | | | | | |
| Biomass | +542% | +22.1% | +138% | +62% | +398% | +40.2% |
| (dry | | | | | | |
| weight) | | | | | | |
| Protein | +520% | +11.9% | +266% | +306% | +856% | +14.3% |
| (yield) | | | | | | |
| CHO | +1095% | −8.4% | +8.8% | +96.6% | +89% | +3.9% |
| (yield) | | | | | | |
| Lipid | +431% | −3.8% | +51.3% | +57.8% | +270% | +56.3% |
| (yield) | | | | | | |

[0062] The growth promoting effect of co-culturing the present isolate (ATCC Patent Deposit No. PTA-127701) was further investigated using two other Dunaliella strains, CCMP1320 and STK2. It was found that the co-cultivation of the present isolate (ATCC Patent Deposit No. PTA-127701) could increase the microalgal densities and dried biomass of both Dunaliella spp (Table 1).

### Example 3—Co-Cultivation of Dunaliella spp. with Other Pseudoalteromonas spp.

[0063] Following the same co-cultivation setup and conditions depicted in Example 2, the effects of other commercially available Pseudoalteromonas species on the growth of Dunaliella spp. have been investigated. It was found that Pseudoalteromonas piscicda (strain ATCC 15057) could promote the growth of D. tertiolecta CCMP364, but Pseudoalteromonas distincta (strain ATCC 700518) could not (FIG. 7).

[0064] Although the invention has been described in terms of certain embodiments, other embodiments apparent to those of ordinary skill in the art are also within the scope of this invention. Accordingly, the scope of the invention is intended to be defined only by the claims which follow.

What is claimed is:

1. A method for co-culturing a microalgal species under a genus of Dunaliella with a bacterial strain under a genus of Pseudoalteromonas in a confined co-cultivation environment to enhance growth of the microalgal species comprising:
providing the microalgal species and the bacterial strain to the confined co-cultivation environment; and
providing a culture medium to the confined co-cultivation environment and a set of co-cultivation conditions.

2. The method of claim 1, wherein the microalgal species comprises Dunaliella tertiolecta with an origin of CCMP364 or CCMP1320, or STK2 (Dunaliella sp.) isolated from Sha Tau Kok, Hong Kong in 2013.

3. The method of claim 1, wherein the bacterial strain comprises an isolate under the genus of Pseudoalteromonas having a genome sequence composed of two circular DNAs represented by SEQ ID NOs: 1 and 2, respectively, or any species under the genus of Pseudoalteromonas having a genome sequence with a nucleotide similarity of at least 90% to SEQ ID NOs: 1 and 2.

4. The method of claim 3, wherein the species having the genome sequence with the nucleotide similarity of at least 90% to the genome sequence of the isolate comprises Pseudoalteromonas shioyasakiensis, Pseudoalteromonas gelatinilytica, or Pseudoalteromonas piscicda.

5. The method of claim 1, wherein the bacterial strain comprises the Pseudoalteromonas having been deposited with the American Type Culture Collection under Patent Deposit Designation Number PTA-127701.

6. The method of claim 1, wherein the confined co-cultivation environment comprises at least two compartments each accommodating the microalgal species or the bacterial strain, and the compartment accommodating the bacterial strain is configured to be permeable to substances of less than 10 kDa in molecular weight between any two of the compartments accommodating the microalgal species and the bacterial strain, respectively.

7. The method of claim 1, wherein the microalgal species and the bacterial strain are provided in a cell density ratio of 1:1000.

8. An algal growth enhancing composition comprising a biological agent or an extract thereof, the biological agent comprising a genome sequence composed of two circular DNAs represented by SEQ ID NOs: 1 and 2, respectively, or any genomic sequence having a nucleotide similarity of at least 90% to the genome sequence represented by SEQ ID NOs: 1 and 2.

9. The composition of claim 8, wherein the biological agent is a bacterial strain under a genus of Pseudoalteromonas.

10. The composition of claim 8, wherein the bacterial strain comprises Pseudoalteromonas shioyasakiensis, Pseudoalteromonas gelatinilytica, Pseudoalteromonas piscicda, or any Pseudoalteromonas spp. comprising a genomic sequence having a nucleotide similarity of at least 90% to the genome sequence represented by SEQ ID NOs: 1 and 2.

11. The composition of claim 10, wherein the bacterial strain comprises Pseudoalteromonas having been deposited with the American Type Culture Collection under Patent Deposit Designation Number PTA-127701.

12. The composition of claim 8, wherein the algal growth is a growth of microalgal species under a genus of Dunaliella.

13. The composition of claim 12, wherein the microalgal species comprises Dunaliella tertiolecta with an origin of CCMP364 or CCMP1320, or STK2 (Dunaliella sp.) isolated from Sha Tau Kok, Hong Kong in 2013

14. The composition of claim 8, wherein the extract of the biological agent comprises a culture medium, cellular and molecular contents of the biological agent.

15. The composition of claim 14, wherein the extract has a molecular weight of less than 10 kDa.

16. A method for increasing biomass production yield from a microalgal species comprising:
co-culturing the microalgal species with a bacterial strain under a genus of Pseudoalteromonas, wherein the bacterial strain comprises a genome sequence composed of two circular DNAs represented by SEQ ID NOs: 1 and 2, respectively, a genome sequence having a nucleotide similarity of at least 90% to the genome sequence represented by SEQ ID NOs. 1 and 2, or the bacterial strain comprises the Pseudoalteromonas having been deposited with the American Type Culture Collection under Patent Deposit Designation Number PTA-127701; or
contacting the microalgal species with an extract of the bacterial strain, wherein the extract comprises a culture medium, cellular and molecular contents of the bacterial strain.

17. The method of claim 16, wherein the microalgal species comprises Dunaliella tertiolecta with an origin of CCMP364 or CCMP1320, or STK2 (Dunaliella sp.) isolated from Sha Tau Kok, Hong Kong in 2013.

18. The method of claim 16, wherein the bacterial strain comprises Pseudoalteromonas shioyasakiensis, Pseudoalteromonas gelatinilytica, Pseudoalteromonas piscicda, or any Pseudoalteromonas spp. comprising a genomic sequence having a nucleotide similarity of at least 90% to the genome sequence represented by SEQ ID NOs: 1 and 2.

19. The method of claim 16, wherein the bacterial strain comprises Pseudoalteromonas having been deposited with the American Type Culture Collection under Patent Deposit Designation Number PTA-127701.

20. The method of claim 16, wherein said co-culturing is performed in a confined co-cultivation environment.

21. The method of claim 16, wherein the confined co-cultivation environment comprises at least two compartments each accommodating the microalgal species or the bacterial strain, wherein the compartment accommodating the bacterial strain is configured to be permeable to substances of less than 10 kDa in molecular weight between the two compartments accommodating the microalgal species and the bacterial strain, respectively.

22. The method of claim 16, wherein the extract has a molecular weight of less than 10 kDa.

23. A co-culture system comprising a microalgal species under the genus of Dunaliella and an isolate of bacterial strain under the genus of Pseudoalteromonas, the isolate of bacterial strain under the genus of Pseudoalteromonas comprising a genome sequence composed of two circular DNAs represented by SEQ ID NOs: 1 and 2; or the bacterial strain comprises the Pseudoalteromonas having been deposited with the American Type Culture Collection under Patent Deposit Designation Number PTA-127701.

The application's sequence listing, which the Patent Office published only in electronic form, follows.

SEQUENCE LISTING (2 sequences)

SEQ ID NO: 1 - DNA, 3646986 bp, unidentified (residues 1-1,823,493 of 3,646,986)
  source 1..3646986: mol_type = genomic DNA
ttgttttaaccttgctgcaacagcaagagctgcttgatagtgagtctctgtatcaacaaatggctcactgtaaacttcagccactaaggtacttaaaacaggcggacccggtggcacttcaactactttaattacaatgccatcggttgccagtggcgctaatgcggcacgcaagcgcatgaccacgccatgagattgatgatcacgctcagttttatcgagcagtaatactctgagttcagcaaggttcgctgcttcacgtcgataataaccacgcaccataccattaaagtccatgcttgatggctgaccaacgtaggctgccgcctcgcttacttcatttaattgccaagtgatggtttgtacttttcgagtaaaagcggcggtttgttcaaggttcgtgccttctggcatatcgattaaaacttgtaactcgtttttattatcaaacggtaatagctttaaaggtactgcacgcattacgggtaacatggcacttgcgacaaacaaagctaatgtggtccatagaacgagtttggcacggcctttagactcaagtaatggtgataatatgcgctcgtataagctatgcggattggcttctagttgcatgctgtcatcaactggcgctttcagtaatttcatggccaaccatggtgtgacaaaaaatgccactatggttgaaccatcacactgaccggtacattgaatgccatcggagccatgtacggcccatcatgccggtgataaaagcaagtggaataaacgccaccatatggtcaatgttgacataaacagcgccacacgaatttcgctcatggcatcaactatgctttgtttttatcgccttttttcgttaaaaagcgacttatgttgtctatcccagtaatgggatcatcaaccaataaacctaaagaaagtattagtgcaaacagtgtgaattgtatagccaaaggcaaaatcaagtgtcagggtaatgccgtagcaaataggtactgctaaaccaaccacaattgctggtcgccaacctaaaaatacgccaacaaaaataaccacggtaaataccgcaaacactaagctcgaggtaaggttatttactttttcgttcgcggtttggccatagtcacgcagtacggtgtagcccacttcatctggtagtagattagccgataaactatccatcatgctgtgcacttcattggctacagctaccgcattggtgcctgcttgtttagcgacactaatagtgactaaaggaagttgttgctgattatctgatttagccaaccattgataacttgtgcttcgcttggcccatcactcacctgggcaacatcacttaggtaaacactcttaccattaaccacattgacaacaagccgttcaatggcagattgagagcgtaaaacatcacccacttgtaaggcaatttgctgcttaccctcaacaacgctgcccacattcaccaattgattagatacgctaagcgcataatacacatcggttaatgttgtttggtgtgcagcaagagcacttgcatcaaggttaatcgttaattgacgagttctacctgcaatcactttcacttcgctggtattttcgatgcgctgtaaactgttagcaatttcgttggcaaagcgggttagttgataatcatcgtaaagttttggatctttactgaataagcccattacaatgggtacatcgttcacttcaaccggacgtatttgccatgaacttatcactgacgccatcgtgtgttgataactatagagtttagcgtaagtgtcgagaatggcttgctcacggtcgtgaccaacttcaaagcgaagagtaacaacagcagcattacttgtgtactcgagtaaatatgctcaacgcccgtcaattgcgctaataacttctctaatggttcagttaccagcctagctacttctggcgcttcgacgtttggtgctgccacataaatatcaagcattgaaccacaatttgcggttcttcttcacggggtgtttgctttaatgccattagaccaagcagcaccgacataataaaaataatgacagggaggcggccgctcaagctgttttttactgcattatcgatagcattcattgcttaatacctttgcaaaataagccatgtagggtcgctaagattgataccacgttttcatccaccacgcggtaataaatagtttggctttcgcgtcgagtcgcaactatctgagcttttctcagcgcgctaagtgttgcgataatgctgactgcgccaatggcactgcttcatttaattcgctcacgctcatttcaccatcttgcagcgaacataagatcatcaaacgatttttattcgccaatatctttagcatttgctctgcttgttccacattgtcggccatagccgcaaaatcgatgttcataatcacactactctatattcttaaaatacgctaaagtatagattgatatattagaaaagtctaatattagaatttactaatgtagtattatctaatatattaaatacatcactctgttatcgaggtctttttatgaaactaaatgacgcgcttcgcctaattgctggtgtaatgatctgtatttcattgttgctacaacagtttcacagtccgctgtggatttggtttacggtatttattgctctaaacttaattcaatcggcattcacgaaatggtgcccaatgatcaccattttacgcagacttggcatggaggattagtatgctgacaccaattcctgacttaatgaaaattgttgccccaaaccagcgccgcattagcgctgaccaagcaaaacaagaattaagcgaaaaccacggtttattaatagacgtacgtgagcctgctgaacacgcaactaaagcagcaacaggtgcaattaatatcccatgcggtgtacttgaaatgaaattaatggaaattgaaaaagatcctgcaagacccatttacttacactgtgcaagtagtgctcgtgccacactgagtgccgaagctctgactcgtgttggctacgaaaatgtcactgtaatcacctgtaatgcaaaacaaatttgtcaggtgttttaacttcatagaacagtaacactggtcggataagctcgtacttttctacttataggtacagagcaatgacttttacacgcagacgctttttaaaagcatcggcggctggttttggagccgccgttttatctttcggtttaacgggctgtagtcttaatgacgatgatgacgaaaccacaaagcaaatccctgtcagctttgatcacggtgttgccagtggcgaccctctcgctgacagtctcaagttcaatcgacaaacacagaaaacgtcacgagtgttaacgttgtttggcaggcctcaacagatgctaacttcacaaccattagccatgatggcgaaacacaggtaagcgatgtaaccgacttcaccttaaaagttgatctgcaaggtctcgatgctaacactactattactaccgcttcataagtaatggtaaaacctcacctactggagcaggtaaaacgcttccaaccgacaacatagaacaagtaaaatttgccgttgtctcttgcgctaactatcctgctggctactttcatgtgtatggtgaaatcgcaaaacaaaccgatttagatgcagtactgcacctaggtgactacatctacgaatatggtaatacaggttatgccactgaaaatgccgccgaacttggccgtttattacctgatgacaatagcgacgaaatcatttctttagcggattatcgcaaacgttacgcccattatcgtaaagacgaaaacctgcaagctgcccatagtcattgtgcatttattactgtttgggacgaccatgaaataactaatgatacatggcgcagtggcgctgaaaatcacaacggcggcgaaggtgaatttagcgagcgcaaaatgcatgcgctacaagcctactttgaatggatgcctatccgtaatgtagccgataaagaacgtatttatcgacgcttcgagtttggcaatttagtgtcgttacacatgctcgatacccgtgttttagctcgcgacgagcaagttaattatgcagatttcgatttaaccagcagccaaggacaagctgactttgttgcagcaattagctcaccgactcgtgccctattaggtaacgagcaacttacatggctaactgatggtttaacaacagcaacaacacaatggcaagtacttgggcaacaagtgctgatgaccaaaatgcatttgccatttgagattttgcagttacttatgaatattcaagtgactcaagcaagcggtgctgacccatctgcattacttgctcaagcaaacacgttatttagtgagcttgcgcaaattaaaggccgtatattagctggcgatccaacggttactagtgagcagcgagcacgcgtagaaacaacagcgccttataatcttgatgcatgggatggctatgcttatgaacgtgaggtaatacttgggactgcaattgcagcgcaaaagaacttggtggttttagcgggtgatacgcataacagctgggcaggacaattagtcactgatgacagtaaccctgtttctgctaaagctgcagctggtgttgagtttgccacatcttcggtttcttctccgggtcttgagaactacttagcgttaaatacgcaaccgagcgaagctgtcgcacaaattgagcaagttattgcattactggttaacgacttagcttacaacaatttagtggaacgcggttacttaacggtcacctttactcaacagcaagcactagcccagtggcattatgtaagtagcgttaaaacagccgattacacactgcttagcgagcgtcaaaaagcgctcagcgtacaagctggtaaccctactttacaactggcttaacgcttttcatctaatagcgtaactaacatttgctcaatgttttttacgctataagtaagtgaacgcagcagttctaactgactatcttcaggtttatgctcagctttagcactgctgctttgcgtcatttcatctttttgcttcaagattgcttcgcgaaaggcctctgcatcaaccactccgagtaatgacaccagtgcaccttgtcctgattgacctgccgtttcaaaactcagtcgataaagaccaaattgacgcattaaaggaccttggctaagtgccacatcggttatttttcaagtgggatcgattttcttctttaaagaatacaccgcgttttaccactaacttacgcgtaaacaacgtggctgacatcgccgctaaaatacgccctgccaccagccagattattaacgcaacaatgggaatgaaagggatacctaccatactaatcacacaggtaaaaatacccagtaataaccaatactgttttacttttggatcaaagctggcactcaataaactggtttctgtcatcataggctccttgataagtagttatgacaatatacaaacttttcattaaatacaaaaaaagccgagcaaaagcccggcttaagggtactgcagggaaagctactccactgcttcaaccgtcactgttagtttactaagatcaggtccttgcactgtaaaacggtaatcgccagcagctgcaatactcagggcgatattggcaccaacggcttctagtaaagcggcttcgccaagtacagcaacaggggcatcaccactgccgccataatctacggtactccaatcttcagaagcgactttgaactcataatcacctgcttctaatgtcatggtggtactgtacatcgcatcaccagcataaatcagtgggttatctgtgccccagccattaacgctaccgcgtaagtacacctgagttgcgccaaacatttctgcattaaatacactcatgagtggctcttcaaggttgctggcatcaaacacaaactgatattgaccatcgcttgcaatatccattgtcatgtttgcaccttttactgcgagcagtttttctgtacccacagtgactgccgcgctgctttcacctgagccataatccaccgtactccagtcttcagaggctactttgaattcatagctacccgcggttaactgtttagtgaaggtataaatacctttaccttgatacatcagctcgtcactggtaccccaatcatttaagctaccgcgtacataaattgcagtgccaacaaatggctcttcgttataaaccttaagtactgggttatcggtgtctgtggcatcgaatgagaacacataaacagcatccattgccgccgtaaagatcatattggcaccactacgtgttagcggctcatcttcaccttcgatcacttcagcaacatcggcagaaagcgcaccaaaatcaacggtagaccaatcttcagaagcgactttaaactcatagctgcctgctgttagaggaatggcaattttgtactcgccattacccacatattcaaagctatttgccgtaccccagtcgtttaacgagccacgaacataaaccgtcgtgctaccaaatggtacgatatcaggtgcccccacagtcgcatcggcacttaggccttcgccttgtgcatcagcttgtggtttcacaaacacagcaacagtatatggcggaacattaaaggtaccttcgccctcaccagctataaagcttgccgctgacatactagagtcaacactcgcttttaaaacaggatggagctcaaaacccgcagccgttgataccgtatgcgataagctttgctcagtgccgttcatcaccacgacaatggcatcgtattggctatctagatcagtcaaaccaacaccatcatcgatactcatcacgactaagccttgctgttgacgcttaccaatattgtggaagccaacgcggtctaagatgtcttgctctgtggttaaactaaataatgggctggcactacgaattgctaagaactcagtaaatacattacttgcgtattcaatgtcgctagccatcgcttgcgcattcgtatttgccgaaataggtgcaatttcgccccacttcgcttggttatcttgcgcaggcggtaaacctacattccagttgttggtttctttactgaaatcaacaaagttgaaccaatcaccagaatcatagctgttacgatccattgatttagaacgcagcatatcagcacccatttgcataaatggaataccttggctcatcagcggcatagctaaagccatattgtgaacacgcacacgctcttcaatacttaagttagtgccatgtttatattgcagctgatcccacaatgtttcgttatcatgcttagagacatagttaatgctgtcagcagggtcaagtgcataagccgcaggctgaccactccaactaaagctactgccttttgctgaattacctttaaagtctttaagaatgtagttttgtaagttacctgccagtgataaacgcaacgtatcttgctcagataaattgccatctgtggcattattgctaaagaatgcaccaccacgaattgcttcacggatacggtcattaaaggtgcctacttcagtgcctgccatatccatttgtttagcttgcacaaataaacggttatcagcgacttcaccaaagttccacccttcaccatagaagtaggtatcagggtcaaccgcttgcactgcactaagtgcggtcataattgatgcttttggcatatgccccatcacatcaaagcggaagctatcgtaaccaaaatcacgggctagaatcaccatagaatcagcaacaaacttatccatcatgacatgttctgttgctgtattttcacaacaggttgagcgctcgatatcgcctgatgtttcgttatatctgtggtaataacctggtaccagtttatcgaagactgatttatcccaaacacctgatgaggtcgtgtggttgtaaacaacatcaagtacgacacgtaaaccaatttcttgtaaagactggaccatcgcacgcgtttctttaactcgtgcaataccttcaggcgatgaagcgtaagagccttcaggcgcaataaaatgatgcggatcataaccccagttaaagctatcaacaccacgcattgcattagcaagtgcttgagcatcatcagagccaggtaggtaagacgccattaaatcaactatcaatgcactcttatcttcggttttacatgcatcggcatcatcattaatgcggctacataaatcacctaaggttgcagtaatatcaacacgctgactagcatcttcatcaatggtgccaatatcagtcagtggcagtaaatggaaatgtgttaagccattatctgctaactttttaagatgttgcattggtgcgctatcaagctcagtaaacgctaaatacttaccacggtttgcttcactgactgtttcatcacgcacactaaaatcacgcacatggccttcataaattaccgcttgctccgggtaatcaattgttggcaccataagctcatcccagccagtcggtttagtatcttcatcatcaaggttaatcaattggctatataaaccattggttgaaacattgagtgaataaggatctgtgctccataagctttcaatttgcttagtcgtcggatgataaacatcaaacataaagcggtagtaatgacgatcgtgactgatatcgacattgctagaccaaatacccgttgcgctatcaaagttcatagcaagttgttcaagctctgttttatcagcatcatacagcgctaatttcatattgcttgcagtcggcgcccataccgacacatcaatgccattattggcgtaatgcacaccaagttgtgcttcattagcgtcactttcgccactggtatataagtcatcgagggctttagcggtttgcacataggttgcttcaattagcttgccatcagcatcgtagcctgccacaactaactgctgtttaataagctcttttgcagcggctgcatcccagctaccttggtacgcattccatccagcaaggtgtggcactttagcgatttgttcatcgctcaaagatgtcgatgtaagctcaactacttgaccatttaactcaccagtatcttcatcaacttttaaatcagcactgcttgatgagtgtaatttaatgatacttgtcagctcattacttggctgataaatcacagtagataaatctatccaatgcgctgatgcaccagaaatactcaccggacgttcacctaagctaacaattggatattcaaatactgatggttcaccatgaatggtaaagttcatgcgttggaacttttcatcgtcctgcatcaatggcatttttaaatcaacatcaccaaacgctttgccagacccttctgtaccaatatgcacgatgaagttagcacactcgttgtaaccctcttttagttttacaatccagtacgcgccatagttagggtcaataccatcgtattcatgaccatttgcccaatcagtggcatcaaacggtgctgcgtaagaatcacagtcatcgttattccatgagtgtaatcgatagccttcgtaggcatcgtcactggtgcggttatagaataaaatggcttcgtcatcagcagggaaaaccacaggatcaggtaaagtgggatcagcgcctactacgcagctttcattattctcatcgggtaccgttggtgccggacaactaatcggcggaggatcaacacactcagtccccgcttcattgggaacttgtgggacactacaggtcaataaaacttgccctgaatctatatcgttacttgcgccaccaccacatgcagctagcaataccatgctacatgcaatcagtaagcggctaaaattagctattattttcatatttttatctccaacttactgatcaatggttataggtaaaacctagataaaactgacgaccaaagaattgcgtggtgcctgttttactggttgtcccaaagtagctttgtgttggttcatcagtcaggttattcacttgtaataacatgccgaatgaatctgtgaactgatacgatgtttggaaatcgacaaccgtttccgcatcaaaattcaccacttgctcattgacagcaacttgctctgatacgaaatcatcgcgataacgcacattcaaacgtgtttcaaagttttcatagctgtaaaaaagtgtgccgttaaaaacattgtttgaaaggccaggcaagtcttgcgatacagaatcgccacctaaatcggtgatagactgcacttcgctctctgtatacgagtaactagcgttaatacctaaaccttcaaacggtgagggtaaaaaagagaaaacttgcgtataggcaagctcaataccacgaatataaccgcccttagcattgttaaccgcagtggtgtacacaccattagtggtttcgatttgctcaccgctgactgggtcgactatgtattctggtacgttaaaaccattccctttaaagtcaaagttctctatggctaccgtatctatgaatgagtcgatattcttataaaacgcagcaacaaccagtgcaccatcggtgtcttcaaagtattgctcgtacgagatatcgtattgatcagcatagaaaggttttaagaatgggttattggtacttgaaccgttaatttcgccgtcattgttaaccgatgcactggcatcgcccgctaaacggttaatcggagcacgcgccatcacttttgccgcagcaaaacgaatttgtgtcgcgtcactcactttaaagttcaggtttaatgaaggcaggtagtctgtgtatttaatgcctaacacgcttggtgcatataggtcgttaacaatgccattgtcgtcaacaatatactgcgcaccgagttgcggatcgccaccgacgttttcgagtaccgtcgctgactgatcggtatctacacgacgaataccaatattacctgtaacgggtaaagtgccaatttcagtatcaatgttaagcatcagataggctgacaccacctcttcatacactgagccactttgtaacatggtccatgaatagttagtggtataaccttgtgcatctggctcaccatcaccatctaaatcaacaacaccatcggcattaccccaggtttgtactggctgcggaataccacttgggaaccacgcgttgagcgctttatctaaatctatcgctaggtatgatgggaaatagctaaactcaccttgccaatctaccactgtagccatgtcatcagtaaggcgaagcggtggttgagtcgaagagaatgcgccgtcgttaccgtactcaaatacagagcgattattgctgtactcacggtctgaataacgcgcaccaaattcaatggagctaaaccagttgttctctaactcatacttaaaatcgagtcggaacgctttgacttcatcttcattttcatacggataaataccgtatttactcaccataacgcggtcaatatcgctaaatgcgtcggcttggttaaaacctacatcaggcaagtttaagccgtttaattgatagttaagcgatacattggtatcgaacacagggttctcaacggtggcatcttctgcaaccaatgcccaaagtaaaccattacggaaattactcttagcacgagataacgacacatcagcattgacattcaaacgctcagtaatttgccaatcgccattaataccgtagctgtctacttcatcaaagtcttggttatcatcattaacgatttcaacacgggtaaagctgtttgatgtgcggttaatcgcgccaccaatcaccgcattaccgtcaagtactgggttagcataaaccgcagacggaccaccaaacttaacccgaaaaccacgggcaaatgattcgctatcaaaacgcgataaaaacgcatcaccttttagtttaaagttatcggctggtgcccattcaattgaggttaaataaccattacgggtttcttcaccacctaagtgctgaagctcaaaaccctcgctaatgtattcattagcagggttatctactggaccatcagtatcattggccagtccatcaacatctttattgccgttataagcaaaaccgataaactgcgtcgccacacttggctggaatagtcgcgcgtaacccaatgccacacctaacgtatcgtcaagaaatttgccttgataagaaaagctaatacggtcgccgtattcggtggcatcaaatacctccgaagcacggtcgttatacataccacgtacattcgcagtaaatttgtgttgctggtcgttatccaatgggctggctgtttgtagctctactgtccccgctacgcccccttcaatgagtgaggcttttggcgacttatacaccgccgccgagctgattaactcagacggatattggtcaaactcaatactacggctaccactggtagatacttgctcacgaccgtttaatgtcgaaaaaacaaatccacctgataaaccgcgaatgttgatttcggcagcttggccaccagtgcgtaccgctgagatccccggcagacgtgttaatgcatcagccatagacacatcaggcaatgcgcctagatcatcggctgatagctgctcagagacagtgtcactaaaacgtttttgatttaatgattgaattaagctgcgactaaagccgcgcacttcgattacttctagctcaggatcgatttccttcactgatgtgcgttcttcttccgtcgccgccattgcactatttgctgccactaaagctagcataagcgcacttagcttgaatttccccattggattcccaccctgttgtcgttggaagtgttgtatttgtggttattgttgttgtcaaaacacaaccaataaagtgtaaccaaaaggtaaatattgtgtgatgaatacgtatgcaataggagcttgctggggaaagcagcgatcacaacccttttttattcgtgatgtaatcgcaatatagagggttttatagggtaataacgacgcgaacagctagagcaataaagattatccctagcaatttttcaaaccacggattcgctttggtaaaaccaaaacgcttttttgatatttcagttaacagtgcaacaagtagataccagcctgtatcaagcacaaataccgttaaacacatgattaagccaacctgcaaagtcaggctctctggatcaataaattgcgaaaacagtgccaaaaagaacactgctagttttggatttaaaaaggcaatggcaaagccatcttgcaacgcgctgcgaggacttggcttagcctgctcaacattcagtgtttgcgggctaggtttagctaacaaaatacgaatacctaaatatgccaggtatgctgcaccgccatataccagcacttgataaagcgttggtagctgcgtcatcagcgcgcctaggccaagtaacgaggcacacgcataaaaaccaaccccaataccatggcttaacgccgctaacatgccgtttttcatgccgccatgtaggctatgttttaatactacagctaaactcggccctggcgacatcgcacccatcacgcaaattaaaactaaactcaaccactcagttagtgtcattattcgttattctcaattagtaataaaacggatgttatctgaccataaaacccagtggcagtggtaattgttttcacttgccaaccagcttggcctaactcgaacacccgttgatttaatgcctcaatatcgatgccaccgaaaaagcgcttctttttaaactcaaccactttttgcatgttagtccatcagttggtattcaaagtcataatgatgaatacccgattcaattcgaattgccattttaccagaaagaccttcaagctctcctgcgccggagtctggcaccacttctaaaatcaatcggtcagtccccttatccatggtgccaaaatgttgcagtacaaaactaccttgcttaccttctaagctaccaacaacttgttcaatcgctacataacctgcgctaccttgagttgcagtcatggcactgagcatttcaccttggcttgttgcatctaatggccctgagaactgtttatcaatcgacatgcgtcctaaattaacgccatccttacctgttgcatagccgccaatagggtttaattttacagtgaattgcccgctgataattgtagattccatactaatcccttaataactgttgatttttagagcattgataaccatatctataccctattcaccaacaagaatctagcatgtctaacaataaagaaaaggccgcatttagcagcttattaccgattttagcttttataaaaccctacaaatgggtagtgtttgcagcgcttggcgccttgttgcttaccgccggagtcaacttatctcttggacaaggtgttaaatttgttattgatcatggttttattgcaggctcacaagctcagctacagcaagcagtgatggtactgattggtttaattagcttattagcggtaggtactttttgtcgcttttatttaatgtcatggattggcgagcgagtcagtaacgatattcgtaaagccgtgtttgaccgcatcgttacattacacccaagctactttgaagaaaaccgcagcggcgagctgatgtcgcgtctgaccactgataccaccttgttgcaatctattataggttcctctttttcgatggcattacgcagtagcttaatgctcatcggtggcttggttatgctacttatcactaacttaaagctaacccttgtggttgttgcttgtgtgcctgtggtattactgccgatgatgatttttggccgaaaggtacgaaaactcgcaagctcaagccaagatgccattgccgatatcagcacctacgcaggcgagatcattcaaaatataaaagtcgtgcaaagttatagtcatgaagagcgtgaaaaagcagcatttaacgaagagactaacaaggcgtttcaagtagcaaaaagccgcatcaaacagcgctcgtttttgattgccgcggtgatattcctgacctttagtgctattagcgtgatgctgtgggttggcggcagcgacgtattagctggcaccatgacaggtggtgagctaggtgctttcgtgttttatgcgattatggtggcgatgtctgtagcaacggttgccgaagtgtacggtgagctacaaagagccgcaggtgcagcagcgcgattattagagctacttgccgttgaaagcatgatcaaaagcccagataaaaatcatgatgcacaacttgaaacaaacaagcttaatcactctgctatcgagtttaatgatgtatcttttcattacccttcaaggccagataaagccgctttaaatgcgctaaatttacaagtaaaacaagggcaaactgttgccatcgttggcccatcgggcgctggtaaaacaacattgtttgaattactgcaacgtttttacgacccaagttcagggagtatttcgctggcgggcatagacataaaagcactctctcttgattgcttacgccagcaaatggggatggtggcacaaaacccaattttatttagctcagacgtaatgcacaacatacgttatggcaacccaaacgccactgacgagcaagtatatgcggcggctaaatatgctcatgccgatgagtttattaatcaacttcctgatggctatcacagctttttgggggagcaaggggtcaggctctctggtgggcaaaaacaacgtatagtactggcgcgagcaattttaaaagacccagcaattttattacttgatgaagcaactagtgcactcgacgcacaaagtgaatttcatgtacaagctgcccttgagcatctaatgaaagacagaacaaccctgattattgctcatcgtttggcaacagttaaacatgctgatgtgattgtcgtaatggataaaggagaaattattgcaatgggtacgcatcaacagttgtttgagactaacccattgtataaacaattgtgcgaattacagtttaatcgagattaattaagcgagtcgatataagaagagaaatgtcaggtttgaaagggcatatcaaacctgaccacaaatctagatgtaatatctaaccttgtgtattcggtacgatctgaatttctacgcggcgatttaaagcacgaccattagctgtatcgttgctcgctacagggcgcgtttcaccatagcctcgcgtgctgatgcgtgcagatatgatctgatgattaactaagtaatcttttacactttgcgcacgttgctgagataacgtcatgttgtagctatctttacccgtgctgtcggtatggccttcaacacttaagtaggttttttcatacttgttcatcacttgcgcaattgcatcaagagtactgtgaaaacccgacgagatataagattgatcagtcgcaaaagtaatgtttgatggcattactaaacgaatattgtcgccttcacgaaccacttcaacaccagagcctgctagctcatcgcgaaatgcttcttcttgtttatccatgtaatcgccaactgctgcacctgctaatgcaccaattgcagcaccaatgaagatacgtttatcgtcatggtcgcctgttgctttacctaatacagcgccagttgctgcaccgattgctgcacctttacctgtgttagttgtttcacaacccgttaataaaacggccaaaacgcccactgttaaaactgatttactaatagtcatgtgtctctccatggcaatattaatttcgaattattatccattataattaaacaacaatgaacaaactatgaagaaagagttaattatcaatagccgcagctgaaacagccggtaagttatattccgccactatttttgttaggcgaccatcgagaactaggttgttcagttgagtttgaatcttttgagcaaactcagacttagcaaattgcttacttaatgctaagtgcccaaaaatcacatcatcaaaacgatacgacatcttttttacactttgtgatggcctttgcaaaatggctgctgaatgatccgctgtttcctcaacagcaatgaccaaatcaactctattcttcagtaacatttcaaaggcattgtgttcacttaaggcttcaactttggtgagtgttttatctttatcgaaacgagaaaaatgggccgctcctcgcattaccgcaatgcgtttaccaactaaatcttgatagttatttactgcaaactcgctatcagcttttgcataaaaaacaaaggaagatgacaacatcatgtagggtggggttaaaaattgcattttttgctcacgagcctctgtgcggataagcccgcccatcacatctagctcattttgctcgagcatttttaagcagcgcgaaaacgggcaagcgacaaattcaagtttcatgggaaggctgctttgcatttcgcgcatgatatcgactatcgccccactaacttggcctgactctgataccatgccgtaaggcggcgcatgatcaacagccaccacaactttttcaaaagtagttgcaaatgcaaaggagctagccagtagtaacaacaaacttgtaaaatactgcttcatagtgatactcataactacgttcactcgttttctatattgtagacggcctagtgtcataaaaaccacaaaaatgtcatacaattttgtcataatagaaacaactatcctgtaacggcaaaagtaatgttatttgttatctttaaacaattctttttattgggctgcatgagctttggcggcccagctgcacatcttggttactttaaacgtcattttgttgataacttaaaatggctcaccgctgagcgctatgcgcaacttattagcctaagccaagcgttacctggccccggatcaagccaagttagctttgcaatgggggttgaaaaaggaggcttattaggtggcctatgtgcttttattggctttaccctgccctcatttttaattatgttctttttggctcttagtgctcaccaatttggtgatatttactttgcggtgatagccgggcttaaactctttgcggtggtgattgttgccgatgcaacctacagtatggcaatgagcttttgcaaaaaccacttacacaaacttatcgcggtactgagcacggttgcgctgattgtgttttcacagttatcgagccaaattatagtacttattgcagcagcagccttaggttggttttatcctcaacttaaactaccagagaatcaacaacacaaatcagtcaaaattgcttggttaccgcttggtttatttactgttttgttactggttagctttttacctttaggtgagtggttttctgtgtttgccccattctatcaaactggcgccatggtctttggcggcggtcacgttgtgttacccattttacaagcgggtgtgccgagtcttgaaaccgagcagtttttatctgcttatgccagtgcgcaagccataccagggccaatgtttaccatagccacatacttaggcgcacagatttctccaaatacgccactcataggtgcgattgttgctactttactaatcttcttacctggctttttattaatgttagcgtttatgaaaagctggttacaattagctgataagccacgctttgcgggtagtatcgcagcattaaatgccgccgtggtaggttttttagccgccgccctttattcaccaatttggcagtcggcagtgcaaaatctgtggcaagtaggcttggtagttgccgcatttacttggctaagaatggcaaagccaccaatttggtggctattgttaggctttattgcttttagcgtactgattggtcagttttaagctttttcgcgcggaggattagcaaccttaatacttggctttagccctgtttgtggctcactcgcacttatctggcctgtaacactctgataaggtctaagcgcgaaaattggcaacactgcaagtagatgatccattatctctgcttgcaagtgctcataagaaatccagcgtttgtcttcactaaaacaatagaattcgattggtaaaccatggttcattggctgtagctcacgcaccatcagggttaaatcacgatttattttttcatgctgcttaagataaccttctgcatagcgacgaaataagccaaggttggttaccggatctggcaagctagaaacacgaatatagtcatgcagtggaatagctgtgtctatttgctcacgaaacgcatcgtcaactaagcgaatactattcatatcgatgtttaaagagcgtttgatacgacgaccgccagactcttgcatgccacgccagtttttaaatgacccagcaaccagcatgtaggttggaatggttgtaatggtgttatcccagttacgcactttaaccgtgtttaagccaaggtcgataacctcaccgtcagcaccatagctatctacttggatccaatcaccataggtcactaaacggttagctgcaatttgaatactggcgacaaaacccaaaatagtatctttaaatacgagtaaggtcactgccgctattgcaccaaagcctgagagaatataagttggcgacttctccagcaaaatactcacaatgagaatggcgcaaaccataaaagtgatcagtttaacaacttggattaacccttgaatcggaatgtctcgagcaaattcaagttgattataaataccgccggcaatgctcactacactacttaaaatgaagccaccataaataatgagcgcaacttgacctactgtttttaaaacgagtgcagcaacatcatgaacaggataaacataatcgaaagttgctaaataaaggacacagcacaaagcaccagcaaagcggcgatttagtttattgagcattggtgcaagcgcaccaatacgctcaggtgacagacgagtaacgaccttttgaatgcctggcaacaataaacgacgggtaaacatataaattaatagtaatgagccaacgccgatagctgtcgccgttaatgcacttacaagtgtcgcgtctggcattgattcaaaccaaggcatcactaattcttgcaggtgagtttgcttcatggcgcttcaacctctttattgatattagcaatgtaatccgcttctttagcctgatgataacttagtagctgcgcatctttttgcaaccataaattattgacatactgttgaaaagtcgttctaaatgcacgatcgtgctgataatcgccaatcatatctgcgctaattgcttgtaaatgcacatccactttaatcacgtttaagcggccacgcatcaggttacgacagatgtgatcaccctcgccttgataaataatcgaggtatttaataatgcatcaaactgctcacctaacacctcaagagcaaaggcaataccgcccgctttaggctttaaaaggtaactaaatgggctattttgctttttgtgtttttggcacgtaaagcgtgtgccttcaacaaagttgataatagttgttggatgattacgaaagtcgcggcaactgcgcttggtacgctcaacatcaaggccctttaactttggattttttgccaattgcgctttactaacccgcttcataaaaggcatgcccatggcccatgcaccagtgccaatgaagggcacatattttaattcatcttttaagaaaaactttggtgcgggtaaaacatctatcgcactaagtacgacaatatctagccagctcatatgattagagataagtaagtaccaaccatccctactaacgctgccttgaatattaatatcgatattctcacaacctaaccacagtgctaagcggttacctttacaccaacctcgataagcaccgtgcagaatatcgctaactactttaaatggcagtagtaatttaagcacaccaaaaagcagcacaagcgtgccccaaataattacgttggcaaacaaaacaatgcttactagaacgcctgttaaccaatttggtaaaaacttctttaacatatgtgtgctctcgagtacgtcaactgcaactacttcgcgtgtgttttaaactctgctagttgctgatttttttcatcccagagacgattaagttcagcttgaaagtttactctaaaatcagcgtcgcctgtataatcaccaattaaattagggctcacttccatgacttcaaccttcacatcaacctgctttacacgcccactagcaaagtccacaaagctaggtatgccgtctgggtaatgaatagttacattcaccactttagaaatttgctcacccattgcttgcatcacaaacgcaaccccgcccgcttttggctttaataaatgcgtaaatggactattctgacgcgcgtgcttatcagcagtgaaacgcgtaccttcaacaaagttaacgatacttaccggcatttctttaaatttttcacatgctttacgtgtggtttctaaatctttaccgcgcaatttagggtttttctttaattgtgatttgctagtgcgggtcatgaatggaaaatccagtgcccaccatgcaagacctaagaaaggtacgtatattagctctttcttcaaaaaaaagttcaaaaatgggatgcgacgattaaatacacgctgcatcacaacaatatctacccagctttgatgattagcgataactaaataccagtctttcgcttttagttgctcaagacccgttacgttcagcttatatgaagcaaatagattttgattaatactgttacaactcacccacatagtggcgcattgcttcgctatccagctcatgagcttttgtaacggtttgattggtatgagtttaatcacaccacaaataaagataggcacaaaccaaaaaagtgtattaagggtgtaaaataaaaaactgaacacacaacggatcatggacattactacttattcctttaacgcttaatcttcaaaatacgtgtagccagcgaggcctgcatttagttctgataaatattgtgccttagattgctcatcaattgccagtgagttaacccgttttgcaaagttttcagcaaggatgtcgctatcataatcaacaaactttaatacgtccttaacgctgtcacctttaattgcgttggttaactgatagcctgcatctgttaactctacatgcactgagtctgtgtcgccgaacaggttatgtagatcacctaaaatttcttgataagcacccactaagaacatcgcgatgtggtattgctggccttgcttgtactcaggaataggtaaactgctctcaatacctgtaccttcaacatagttacgaatttgaccatcagaatcacaggtaatgtcttgaataatagcgcgttgcgttaacggcttatgtaagttttcaactggcattacaggaaataactgttgaataccccaaacatcaggcagtgactggaataatgagaaattaacaaatagcttgtcagccagtttttcgtttaaatcatctaatacttcacggtgggcacgggcattttcactgagagaagcacgaacacggtgtaagatagtgaagtacaactgctctaacttcgcccactcaatcatagtcagcaaaccgtgaacgtattgatcatgtgcttcactaaataagtgcattgcatcgtgataaatttctagtgccatgcgcggagttaaccgctgtaagcactgccacatttcatcgagcaccaatacactgccagcctcaggcgcagctgggtttgcatggttaggtgcacgttcaacatcgataacatcagtaattaataccgcgtgatgcgcagttaacgcgcggcctgattcagtaataatggctgggtgtttaaggtcatgttgttggcacacttcagcaaacgcattaacgacattacgtgcatattcatcgacactgtaattcattgaacacgaactacgagaaccagaaccttcgtagtcaacacctaaaccgccacctacatccactgtattaagtggtacacctaactgcgttaactcagcaaagtgacgagcacattcacgcaatgcacggtgaatatcacggatattggctatttgagagccaatatgaaaatgcactaattgcattaaatggagcttattacgcgacttaagtagctcaacagcagacaacacttgccctgcagttaaaccaaacttacctttttcaccaccggtattttgccatttacctttaccaaccgagtttaagcgaatacgaataccaatcgatggctcaatgcctaagtcatcaatttccgctagtaaagtagttagttcagagagcttctcaacaacaatgtgaaccttgtgacccatacctttacctatacaggctaagcgtaaaaactcactgtctttgtagccattacaaacaatagtaattggttctttggctacgcctaaaatcgccataagctcaggttttgagccagcttcaaggccaactaaaccacttgggtgagcaagtaacttgctaacaacagagcgttgctggtttacttttatagggtaaacacaagtatactcgccctgatagtcccgcgcttgacgtgccttggtaaatgcacttgttaaggtgccaacgcgattttgcaagatatcagtaaagcgcactaatacaggcaaagtaagaccttgctttttaaattgttcagtaagctcagacaaagatatcgctgactttgtttgatcgccatcaggataagcaaccagctcaccttgtgcgttaatatcaaaatagccgtcactccaatgagcaacattatatgtttcgcgtgctttgtctaaaccccaagtcatggcaatgtcttctgtaatttcaataaatataaacgcacattttaatacgcccgagctgcccacgctaacaaaaaatgcactctatgccaaagtgataaaaaatattcgctatactgattaaaatttgattgagcaattggccaagcactggcagaattgcaccccttttttaccattaaccaaaagtgtataagcaagatggccaatttagatcaaaacaactggtttactgaaattagtgaccgtgatggtagcgccttttcactacgcataactaaaaagcttgatgaacagcaatcaccatttcaaaaagtagaaatgtacgagacaactgacttcggtaatcttatgattattgatggttgtacgatggtaagtagccgtgaaaactttttttatcacgaaatgatcagtcatccagcattgcttgcacacccaaaccctaaaaacgttgtgattattggtggtggtgactgcggtactttacgcgaagtattaaaacaccctggtgttgaaagcgtaacacaaatcgatatcgacgaagttgtgacgcaaatgtcacttaagtacttccctgagctatgtgaatcaaaccaagatcctcgcgctacagtgatgtttgacgacggcattaaatacatgcgtgaagcagcgcctgaatcaatcgatgtggtaattgtcgatggtacagatccagttggcccaggcgaaggtttattcaaccatgctttctataccagctgtttaactgcacttcgccctggcggcatcttaattcagcaaagtgaatcaccacttatgcacatgccactattagtagaaatgcgcgacgcaatgaaagaggttggctttgttgacctacaaacactacctttcccacaacctatctacccaagtggtttatggtcagtgacgcttgctcgtaagtcagaagcgtttgcaggttttcgtgaagacgatgcaaatacactcgcgcaaagcacagaatactacaatgcaggtattcaccatggtgcattagcaacaccaaattatatgaaacgtgcttttgagaaaaagtaagcgttttagttagatgtaaaaaagggctcaattgagcccttttttattgtattaaaccttaaaccgattcactaaatgattgagttcattagttagttgagtcatcctagttgccacttcttgggttgaacttgccagcccgcccccttgctgagtttgatcatttaagtcagataagttttgactgatttcatcagcaacagcggtttgctcttcggtggcttgtgccgtttgcattgccatatcattaacttttacagatgagtcttgcatggcatttaaaatatcattcgtttgcgcgaaagatgctactgcctcgtcagcaaaacgtttacccgagttaatagcttgcaatgactgctcaacactaccggcaaactgttcaaccattgtttgaatgtcattggtactttcttgggttcgcgtagcgagtgttcgcacttcatcggccactaccgcgaagccgcgaccttgttctcctgcccgagctgcctcaattgccgcattaagtgcaagtaagttagtttgctcggcaatcgcacgaataacctcaagcaccttggcaatattgtctgagctttgctgcaactccgttgagcgctggctggcgtgttccatattttctgacaacgctgtaattttacggctcgaattatcaacggctgttaaaccttgtttagcaagctgctgtgagttatcggcttcatgggatgagttttgcgctacattggctacttcacggcttgccacactcatttcatgtacagcacttacaatagactcagatgcttgactgagcttttgatttacttgatggttttgattagcgaaattgcctagatcgttaccaagcgtattaagctcttttgcctgttctaaaatatctttaataagctgctgcaaattatctaagaagcggttaaatgcagttgccagttcggcaaattcatcttgggttttaacatttatacggccagttaagtcaccatctcctgaggcaatttcgttaatccgttcagtgacaaagttgatctgctttgtaagctgacgtggtacaaaataactaaaccaacccgccacagctaaaaccactgcaatcatcaccataagcataactttaaagcccatgattttagccatcaatctttctgtttcgtcttgcgacgttttttcagctacttcacccgctttatctaaaacatcacgtagttcagaaaaggtctgttcagccgcttgtttttgcgaagcgttagctgggctgttgatataagctgttgaggctttgtaccaagcatcaaacgcgctatcaaagttacggaattgccctgcaatctctgcataaggtgacatataagataagtattgcttaaaacgatctttcacttgttcagcattctcttgatgctcagtaagctggcctttatcacccttcaattgggtaacaagttgcagctctgccactttggcttgatacaagtctcgatcagcattaacaaccacagagacagcctttaaaaaacgttctgactgtgcatcaatggcttcttcttgaaggttaattaaataggtatagcccgcaattaggagaattatggcaatacctaataacgcgattggtaacgaacttttgacgcgaatgctttttaacttcatacattgtcctaattcaaaatctaacctacccactctttagaatggtagtagaaaaacgataaaagtgtatgaaattaaaattgccatcccgctgaaagttgaaattgctgctgcgagttatgctcattaaatcccataccgggtctattttgagcgtcactgctcagcactgaatattcagcacctacttgccacttgtttgacagttgatagcgccaacttgcggttaaagcttctccacgactttggttaggatcaaattgccaatcatcatgatcacttaccttaaagtaatcatacctaattgtaagacggtgctggtctaacttgtggcttaataaaacaaaatggctgtaaaaatcgttatctatcccacggtatttacccattgcggttttgccatctagcatctgaacaataatgcgtgtttgctgattgaacttatacaaccatgccgcacttaaaaaacgtgtatcccacgcatactgacctgtacgggtatttaaagcaccggggtcaccgttattgtcataataataaacgcgaaactgtgaccttttttgataatcccaatgcatacctaaataatatccaaagcgaccatctacttcttcgaaaggctcaacatagtcagcttgcttatctagctgcgcccattcgaatgaatatggaatagcaaagtcgatttgttcattaaacgtggtttgcctatcatgcatagcgaatcctcgccatgacagcagcgttcctgcagggtcgttacctttaaaaaccgatgcaaagccttcaaaactgtggttacttctaaactgacgacctgggcgtttaatactggcctcaagaccaaaggcacgcacctcttcccctatccacgtattaatcgcagagttagtatagttatagggtgatatccagccactttgcggattctctagtgacatttttggataaaagccacccgctttaacagcccatttatagcgacttgctgtgagaggctgatactgtaaataggcctgactaaaacctacggttagttcaggatcaggatgagcgttaagcactgtatgcgcagaccaatctcggcttaattcaaaacgactactaagcatagcttgggatatcactaaagcatcatgctcttggtcataacggtacaaaccaattccttctcgctgatagctcaacagttggtcgccacgcacagccgtcacagttaccaagccatcatgctcagcaaatgccagcgcaggtaaccccaaaacactaaccaatgccaaggcttgccagttattcataatcatcaaactcatcgttgtttaattctaattttggtaacaaagtttgctttaatttgtagctaaattgactattagaggtggaaatttctatcgtttctggcgaactaatatcgttaaagcgatcatgccaaaccgccaatatatgaggcccttcaggtagtggtaaatttacgataccctgtttgtctgtttgcccaaatacagtgccatcaaccacaacaatatagcccaacatccagtcatgaatattacaaccaagttctacaacgcccgtttgcgcaaagttaatcggttgttctggtttatcatggtaaagctttagctcaaattgcttcgttttagaaaacgagtaaacatgatgcatgattgaatcaaggttcggaaattcaacattcgctccttttggtacaaccaagacatgaggaacaaacgcacgttcctgctggctcatagtgtaatgagtatcaggcaaagttagctgctgagaaccttttaaccaaacaaccgcatttttgaccggttgattctgcttatccactatttgtatttgctgcgccaataaagcttggctaaacaatagtagtagcaacagggttattcttatcattttttaaacctttttcagtatagggcctgatatcacagcactcactttgttgaatacgtatgcagatctctcgtattaactggcaagtcactttatgcttgaagcatgtatgtgaatacgtgacaacaatccataaccataagccgccaaggaacaacaatgcgattaactgccttaatgttagcagccttttcaggtacttgcctagcacaaaccacaaccgtcagttcacctgatgggcagatcaaagtaaccatttctgatgaacaacacacacctagctacgaaatcagttttgctggtaaacaagtcattgctaactcagcgttaggccttgtttttaaacaacaaccggcaatgagcgaaggttacaaaattagcagccaaaccactgactctgtaaaaagcagctgggaacaaccttggggtgaacgccaaacagtggttgataaccataacgaagtcgctgttacctttaaaaagccacaaccacaaggtggcacatttacagtacgttttcgcgcttttaatgatggtgtcggctttcgatacgaattaccaaagcaagctggttttgatgatgtagaaatcactaaagagcttactgagtttgcaattacagactcatcagatgcaacggcatggtggataccagcgcgtggttggaaccgttatgagtatgtttataacaccacgccactacataaagcggcacttgtgcacacaccatttactttaaaaaataaaaatggtgtacatatcagtattcacgaagcagcccttgttgattatgccggcatggttttaaaccaacgtcgtgatggtactttccaagccgatttaacaccttggtcagacggcgtagcggttaaaaagcacggtgcatttaatactccttggcgtacaattcaaattggtgatgaagccgttgatttaatcaactcagatatcatcttaaacttaaacgaaccaaataaactgggtgatgtatcttgggttaaaccgggtaaatacgtaggtatttggtggggtatgcacatcaatgaaaatacttggggtagcggtaaaattcatggtgcaaccactgcaaacactaaatattacatggacttcgctgctaaatatggcttcgatggcgtgctagtcgaaggctggaatattggctgggatggcgactggttttataacggtgacgtatttagtttcacacaaccttacgacgactttgatattgaagagctgactcgttacggcaaagaaaaaggcgtacaattaattggtcaccacgaaacttcgggcaacgtgaccaactaccgtaaccaaatggaagatgcatttgcgttatacgaaaaatcaaatgtaagccaagttaaaacaggttatgttgctgacggtggtaacatcaagcgtatcgatgaaaacggcattgtacgcaaagagtggcacgatggtcagttcatggttaatgaatacctacacaacgtaaaacttgctgcaaaacataaaattagtatcaacacgcatgagcctgtgaaagataccggcctacgtcgtacataccctaactggattgctcgtgaaggtgcccgtggccaagagtttaacgcttggggtacaccgccgaacccaccagagcatattccaatgctagctttcacgcgtatgcttgcaggcccaatggactttacgccaggtatttttgatatgggctttaacggtttaggtgctgataccaaccgcccacaaacaaccctagcgaagcaattagcgctatacgttgtaatgtacagcccaattcaaatggccgcagatttaccacgtaactacttagcgaaaccagatgcattccagtttattcaagacgtaccaactgattggcagcaaagtattgcactacaaggtgaagttggcgatttcgttgtatttgcacgtaaagaacgcaagcgtgatcaatactcaggtaacgactggtatctaggtgctgttacagacgaaaaagctcgcactttagaagtgaagttagacttcttagataaaggtaaaaagtttgaagcgcaaatctaccgtgacggtgacaaagctgaatgggtaaataacccttacgacttaaaagtagaaaaacgcatagtgactgctgatgataagctaacgttaaagcttgccaccagcggcggcacagcgattcgatttaaagcaatctaagctgtaagttttaagcttcaagaaaaaagagcgcggcatttgatgtcgcgcttttttattgttttgagaaataggaggactagtaatggctatgattacttgcaaatcacctttctcaaaggtaaattttttgaatgattactcaggtaagtaaagaatggaccctttagaaagacttgcacagagaaataccgcacataaaatagctcgtaaaaaagaaaagcgtgaattactttggcatattccgatcactgtaatcagtattttaacttatacgtctatttacatctttttagtgactgacgacataaacccgaatgatttgccaataactgtaaagccagtatgggtggtttcaaatctactaactctggggctaggtgccacgctctttgtaagcagtattgcgtttttagtatttctatattttttaacgaaatatataaaggtaaattttttaaagctcaaagtggcaactataactgctatgctatttctggttagtgtatctttttttgcacttggcaatttttgtaacagcttaatttataaaaataaaattttaattgccgagttcatgcattttggcttttatgaaccaccgactctcattcagatggctttaaactggctaactatcttaatagttaccttgctactttctttaaatttcatcattgcttcagcccccttcaaagcaagaaagcactttaaaactagttttatcgataactcataactgtggcaacttaaattataagtacctaactgctctgtaaatctccacccataaaaaagcagcccactcgggctgcttgaaactcatagcttaaggcttaaagctaaatacttttaaaaaggcaaatagatttgcgcgctgaggccaccttcagggcgattaagtagctgtactcggccgccatgcatatcgacaatacgtttaattatcgcaagacctaagccactgccttcactaccacgtgccgcatcaccttgtttgaacggttcaaatacggtttcaagttcgctttcaggaatacccgggccgtgatcattcaccaccaccatggcaaactttttattactgctcacgcgagtttcaacttcaatatcaccgtctgaatagcgaattgcattttcaatcatattggttacaacacgttttattgccaccgtgcttactggcacttcgcctaagcttgggttttctgtaaaggtaatagtgcgatgatgcttttgctcagcttcaacgacttctgaaacaatcgcatttaagtcttcaagttcgagttcttcgcgtttgtgatggcgtaaatattcaatgaattgatcgataatggcgttcatatcttcaatatcatgaatgatcccttcacgcaggtaatcttcatcgtccgacatcatttcagtcgctaaacgaatccgcgtaagcggggtacgtaggtcatgggaaacacctgccattaataatcggcgatcattctcaagggcagcaataccacgcgacatttggttaaacgctcgggttacttcaatcacttctgtagagccctgctcttctagtttggtagaaaagtcacctacccctactttaacagcggcttgttgcagtgcttttaaaggtctatttagatgacgggcaaacaaccaaccaccgagtacacttaaaaagccaatactcgataaataaaaggttaagaactttaggttgttttcttgcaatccggtgagcggcacacgtacccaataacctggcgcttgcggagcttcaacccaatacacaagcggatcggtttggctaatacgtacccgcgcagagccattaagctctttcgacatgctgcgcgatagcatagagtactcgcgagtttcagccaacccttcacgcatagcttggcgctgcgtcatgacctcaatgccggtgatctcaaaaaacttgtcagaggcttctttgcttacctccactccctcttcccattcaataaacacggttttaacctgttttgagagaataaggtttacttgttctatcgttggtttaacaacataaaaactgactgtgatataagagactatttgattgattaacagcagggccgcaaccaaaaataccgtttgtccaaacgcactacgtggaaacatgcccattgctattatttttcaccatctggcacaaatacgtagcctaagccccatactgtttgtatataacgaggattagccgcatcaacttcaatcatacgacgtaagcgcgatacctgaacatcgatactgcgctcaagtgcactgtaatcacggccacgtgctaagttcattagcttatcgcgactaagcggttcacgaggatgtgttaccaaggctttcaatacagcaaactccccactggttaacgacattgttttgtcaccatgactcatttcgcgggtcgcaaggttaagagtaaactcaccaaaactaatttcgttttcttcggcagcaggcgcccccggcacttctttagcacgacgacgtaaaattgctttgatacgcgcgagtaactcacgtggattgaatggtttaggaatgtaatcatccgcacctagctctaaaccaatgatgcgatcaacttcatcgccttttgctgtgagcattacaataggaatgtcattttctttttgacgtaaacgacggcaaattgaaagaccatcttcacccggcaacattaaatctaatacaatcaagtggaagttttcgcgctctagtaagcgatccatttgctctgaatttgctgctgtacgaacaataaaaccttgttctacaaggtaacgctctagcaaactgcgtaagcgcatatcatcatcaacaaccaatacttttgtcgtttcgtgtcccataactttcattctttttgtaatatgttacttattaatataaatgaaaaagttaagaataaaaaacgaattacgcgcttagattgttactgaacatttcaaaatcctgctcgacaaagggtatactttgcggctggttttctttttaggctgaataaaatggcaaagacaaatttaataacccgagaagggtatcagcaattacaacaagaacatgattatttatggcatgaaaaacgccccgaaattaccaaaatagtgacttgggcagcaagtttgggcgaccgctctgaaaatgccgattatcaatttaataaacgtgttttacgacaaatcgatcgcagagttcgttatttgcgcaagcgtatgcctgaccttaaaattgttgactacaacccacaacaagctggcaaagtattttttggtgcttgggtcgaaattgaaaacgaacaaggcgagacaaaacgctttcgtattgttggccctgatgaaatttacgagcgtaaagactacatatctatcgatgcaccaatggctcgggcactgcttggcaaacaggtcgatgatgactttacggtaaacacgcctgaaggtacaaaagagtggttcatcaatgagataacctatcctgatgcaaaataatttttcccagaaaattcagaaagcgttaattaatgattgtttagtctaaaaatgtgatctataactaaagatactcaagatagatcattacttgagttttagaaggtagtaattatgtcaaacgcaatgcaacgcataataagtaatgcaattgtattcgcacttttaataagtgtgagtttgatatcttatgccaacgatatagaaagccactcagacagtgttacaccaaccgcacattttattgcgtgtgatagtgcagaccctgccaatctagataccgacctagacaaacatacacctgcgtacatcgccaatgtagcccaaccactgccagatgcacgtgttgtgttgtatgctcaaccttgtaacaaggcgtctgtttatagcgcacaccagcgagggccacctgctttttaattaactcaaatttttctatttcagttttattaaaatgtatggtgaacaaaatgaataaattcaaagaattacgtctacaagatatctctaatggcgcattatctaatgcagtaaatgaagttgagccaacacttgatctcacttcttctgcacttaaagtacttaatagctttactaaaaaagacccgcttcgtgcccactatggcacatctatcgttgatgcgttaaaacaaacaaatagttgctgttcagattttattttagtgattgatggcgaagataaactgctcgggatcacctctagcgcagacttacaaagctcaaagattatgattcttgcgcagcgtttaaacttacaccgtgatgaattaacactacacgatgtaatgacaccacttagcaatttagcgggagtaagcttgcagagcatcagctatgcatgtattggagatgcactgcaaactatggagcatcaaggtatgatgttcttattagtgactagcgcaaaccatgaaatttgcggtttgatttctgcgcgagaaatcgctaaaaaactccatattccggtcaatatcaatccaatagctaacagcttcagtgaagtcatgcagcagattgaccacccacactaacgcctaaaaccagcgttgtgtaaaactatttttgcgggccttaaaagcagtgcttttaaggccttcttattgtgatattattcaggcaattaatcttcagttttactgattttctatttctaaaaaggtttatgcatgagcaatatctctgcacgcttagcgaccgagctaaatgcccagcaaacacaagttgttgctgcaatcaaattacttgatgaaggtgccacagtcccttttatcgcccgttatcgtaaagaagtaactggtggtctagacgacacacaattacgtttacttgaacaacgtttatcttatttacgcgaattagaagaacgccgcagttttattcttgccaccattgaagaacaaggcaaattaacagcagagctaaatgctgatattaataacgctgacagtaaaactgagcttgaagatttatatttaccgttcaagcctaagcgtcgcacgaaaggtcaaattgctattgaagccggcattgagccgcttgccgatgcattatttaatgatccaaacctcgatccagaacaactcgcagctgattacataaatgctgatgcaggctttgctgatagtaaggctgtacttgatggcgctaaatttattctgatggaacgctttgcagaagatgctaagttattggctaaattccgcagccacatctcacagcatggtcaaatagaaagcacaataatagcaggccaagaaaataatggcgctaagtaccgcgactactttgagcatcaagagccacttaagaaagtaccatcacaccgtgcactcgctatgcttcgtgctcgcaatgagggggttttacaactcagtatcaaccctgaacctagcgcagaaaacccagcccaagtgtgcgcacagatgattgccgatcattatcgcttagatgtaagcaactctgctgcaagtagctggctgatgagtgtggtgcaatgggcgtggaagattaaattaagccttcaccttgagaatgagtttttaggcgcaatgcgtgaaaaagctgaaactggcgcaattgacgtttttgcgaaaaacttaaaagatttattaatggctgcacctgcaggcccgcgtactactctaggtcttgatcctggtttacgtacaggttgtaaaattgccgttgtagacagcacaggtaagcttttaaccacgcaaaccattttccctcatgcaccccaaaaccactgggaaaaatcattacgtaccttagagcagttatgtcgccagcacaaagttgagctaatcgccatcggtaatggaacagcttcacgtgaatcagataagttagttgctgaacttatcaaagcgaacagtgaacttaaactaaataaaatcatggtcagtgaagcaggtgcatctgtttattcagcgtctgaatttgctgccaacgagttccctaaccttgatgtttcactgcgtggtgcggtgtcaattgcgcgtcgcttacaagaccctcttgctgagctggtaaaaattgagcctaaatcaatcggtgtgggccaataccaacacgacgtatcacaaagccagctaggacaaacgctaacatcagttgtagaggactgtgtaaactcagtaggtgtagatttaaatatggcctcggtgccactacttactcgcgtatcgggcttaaataaaacgttagcacaaaatattgttagctaccgtgatgcgaatggttcatttagcaaacgctctgaactgaaaaaagtagagcgtttagggccaaaagcctttgaacaagcggctggtttcttacgtatcactaatggtacagatcctcttgataagtcatctgttcaccctgaagcttacccggttgttaaacgcatctgcgaaaagaacaacctcgatgtaaatagcttaattggtaactctgatatcttaaataaactggttgctaacgactacacagacgaaaagtttggtttaccaacagttaccgatattattaaagagcttgataaaccgggtcgtgacccgcgtcctgagtttaaaacagctgaatttaaagccggtgttgaaaccatcaacgacctaaaaccgggtatgattctagaaggtgtagtgtcgaatgttgcgaacttcggtgcctttgttgatgtgggtgttcaccaagacggtttagtgcatatttctgctattaccaacaagttcatctctgatccacgcgaagtagttaaagctggcgatattgttaaagtaaaagtacttgaagtagatgcagcacgcaaacgtatcagctttactatgcgtttagacgatgatgttgatactagtaataaagcagcaccagctagcaaacctaagccagctgcgaaagcgaaaagtgcagcacctaaacaaaaacgtgattttggtaatgcagcaatgggtaatgcctttgctgatgcatttgccaatgcaaaagtgaaaaaataaaaccctataggtgtaaattgataataaaaaaccgcgtgagttttaacttacgcggttttttaatttaagaagcttaaataaaagcagagaactggttttgattagtgggcgaggtagatgcttgataaaaattagcaatacgtgcggcacgctcatctacttcaacatcacgctttgctgtttttgtttcactgctttgagttgcgctatcttcggcatactcactgtttattttgaaggtcgatttgcctgagtcagcatcgccatcagctgattggctggcaagctcagcctgcgctgccataagcttttgtgtggcatctgcagcaattgagcgatcagcacttgaaggctcttgtggtgcaagtgccgctgcacgcaccgtctgcattttttcgattgtggcttgtgggtcaccttttatttcagcaacatcaatttgcacctcgccgccaacagcatagtttgtaccatcggggccacgttgatactcgtagctaggagagcccgcatactgcccccctactgtggcatgcgcttgctcatgaatacgtacttcggtatcacgcgcttttaattcttttatttgttcagcgtcttgttgctcttgctcagcaaccttttgctcttttttctgttcttgtttagcgtcttgttctgattgctctggatcgccttgttcactgccttgttgacgctcctcaatcactttatcttcagataaacgacctttggcatcgtaagtaccagcctcagaacccggttgcttggttttatcaccatcactaagcgttttattttcggcattacttggtttagtagcagcaggtggcgggattacttcacgtaactgattatcacggcgagcactttcggtgtgcacattcgccgtgttgatattaatcgagggaaacggagtaacgatattcataagtgctaaactttgatatcaattaacgtacccagcacttcatcagcagtttgaatggtgttgatgtttgcttttgcattaaattcttcaactttcaaattaacaagcgactcatcgattggggcaggttgtgaaactggcggagttacagcttcatttggagttgccgcttgtaattggcgttgttgagctagttgggcatcatcttgctgatcaattgaggcacggctaatctcagcgctcgccttttcgataccttggcttgcacggttataaccttctaccgcattattaaaaacagaactgattggcataacaccctccaacagtgagattcacttgttaagtatcgctcataaaacgagcaaaataaagctaaatcccgctatttttgtggcctacggccgagtttaaattaacacattgatttcagtgctgttataaatgcttttttatgggagataaacggggcatgcgatgctttatctaatacttcatactcaaactcaggctgtaaagcatgcattttttcaattgctcgataaggaaccagtgaatctaagcgaccaaaaatgccacatactggcacacttagctcagcaaacagtgagcgtaaatcgtcatactgcaaaatttctaaacctgcgcttaaagcctgctcttgtggtgctggatactgatttaataaagtttttagttgtttaatatcttcacgggccgattcactgcccatcgcctggattgctaaaaatcgctcaatggttttttcgcggtgactaacaagttgctctttgaaggtatttaatacattcggtttaatacctggccagtcattctgctcggcaaagaaaggcgttgatgcaacaagcacaactttagccaccttttctggccaatgagctgcaatgtacaaagcaaataatccacctaatgaccatccaacgagtaatgacccttcattcaattgctcactaagttgctcagcagcggcatgcaaggtgtaaggggctgggcagttttgtgcattaccaaatcccggtaaatccaagcaacgaacctcaccatcatggaaaaattccagttcaggcattattacttgccacacgccttggttcattccccaaccatgtagtaacaccatatcattttgcatatttcatcattccagaccacacttagcgctcatgatagcgtttaaaggaatgaatgcaatgtctcgtttaacccatgctttaaaactaggtttagacacgttatttccaaacttttgtattggctgtaacagccatattaatcctaaccatgctttatgcagttattgtttgcaagatctaagcttatttgatttagaacgccacccaaacctgttacacaggcctgatgtctgtgatgcttttcctgactgtcagtttgaccacttaattgcctgcgcttggtaccaagcgcccttaaatcaatggttaaagcagttaaagtttaatgaccaacagtattataagattgctctacaacaaatcattagccagcaacttgcagttgctcacaaagtaaatatccactggccagacgcttttattataatgcccttacataaacagcgatttttaacccgtggcttcaaccaagtcagtcaaacatggttgcctgtactccagagacaaaatgagcctattatttcgcctcttcaaaagctaaaagctacaaaagcacaatcaaagctcagtaaaacgaacagaattaaaaacttaaagggtgcgtttatttgccagcaggatttgtctgcaaaaaccgtggcaatcattgatgatgtgatgacctctggcgcaactttaaatgcagcgactgaggtcattaaagaagccggagctaaacaggtgtgggctatgcttacctgcttaactccgttaggtgcacattaaaggtgattagtcagctgaggcatagaatgcgttaccaaaaaataatgcattgctcagtaagcgactagtgccgtaccagtaaccacgaaatactgggttatcagtcataccaatgacactacccttaccgtatgagtgtgcaatcagtcctgctgcacccgctacttgctccacgtttacgtcatcagtaaagccagctaaaagcggcttgtctgtgtaagtaagtacgttaacaaaaggtgcgtctgatttctcaagtaaccaagtgctattcttaaacactggcaatgtattgcgatttagcgaatacgtcagtgggtgagataagtccactgaggtattaaaaattgcacccgcaatacgctgacgaccagcgaggtcatccttatcagcataggtaagccctgttgtatcaaaggcgctggctacatcacgacgagataagtaattagcttttaataattgttgatcggctaggaacttagctccgcctttgtgtccccaaataactccgcctttacgaacccacgacttaattgccactttcgttgcatcatcaagacggttgtaattaccgtgcgctagaatgatatggctgtagttttcgagatcaatatcatcaagacgttgcatttcaacaatgcttggcgctgtgccaacgaaacggtctaggtaataccatacctcgccaagctcatactggctgctcccttcaccaccgactaatagcactttcggcgctttcactaccgccattgaacgagagcccaagtcagcacctttcaccgttaagcctgagctaatgggtgtaatttcaatgccaaactcgttttgtgcttggtttaaatagctaacccagttgctatctgtttgcagacctgcaggcacaaggatacttccaggctcaaaagcaatctcacccataggcgtttttgctgtgagtgggcttaatgccacacgcgcttttacaccttgttcgagtaagctattaagcatttttggcgctaaataatcatcccatttgaatgcataagcatagctttgtggtaatgctgcatagcttgattttacaggctgttgccaaggctctttagcaacatttaagccccaattgctgcttacttttgcaaactctagattgaaagcatgcgcaagagtccagccagatacatcataaaacgtattatcgacaaaacgctgttgctcactaaaaatcgctttaattaaacgaaattgcggctgtgctaatggcacatagtaacttttttcagaaaagctttgaccatttacttttaacggctcttcgagcacatacgcattaatttgatgctgcttcaataaatcaaggaagtactgcatgcgactagtatcagcaccacctttaacaacataacctttgaagtcttcatcgccagcaagatctatcgctttgttgtaaaatttggcttgataatcaagtaagtcagtacggttatcaatcgccgcttgaaacgtcgacaagctagttaataactgatttttaatcgtaaacggaaaacttaacgggccgttgatggtttcttgtaagtgaccacgtgagcttgcttgttcaaataaaatacctacaccgccatttacgtctgggtaagttgagcctttaccatagtaaaagtcatcaaagctttcttcagtgaagtaaagcgcattatgctcatcaagtgtctttgcatgataatttgcaattgctttagtcagcgtaacgttttcttcaggcgtgattgggtgtttacgagttgggatccctggctgaaaaaaatacgtgctattcgggcccatttcgtggaagtcagtcagaatatttggcttccactggtgaaactgtgcgatacgtgcacgtgattcagggtgttgcagcaataaccaatcacggtttaagtcaaacaagtaatggttagtacgactgcttggccagctttcgatatgctcgcgagtttgtggatctgatgacaacttcataccacggttgctgtttgcccaatttgcaaaacgcgctaagccatcagggtttaatgatgggtcgagcaaaataaccgtgttattcagtaaggtgtcaattgctggcccttgtgcagcggccaaataataggcaaccaatagcgatgcattgctacctgatgattcattgccatgtacgctgtaacccatccaaacaaccgccggctgtttgcttgagtcattagcaccaccatttaaacgcgctaaatgagctttacgaatagattcaacttggcctagcttgtctggtgcagtaatcgttaacattaccagcggacgttgctcgtgagtgcgaccaattactttaaagttcattcggtcacttttttcggccagaatttgcatatattgcacaagctgatcatgtcgcacatgccactcacccacctcataacctagtacctgctcaggggtaggaatatttgggtcaaatttcacatcttgttcaaagtaataagaaagaggttttgctaatgcgctaacgctcactagcatagttaatattgttattataaaacgcatagatagcacccataattatttgatgttttaacgctaccattcgataaaatagatgcaactttttacgctcaacactggcgacaacacgatgagcggagtatgataggcagtatccgagtaatttagtcaagtatagtccgttttatgatctctatttctgaatctgcacaatctcattttgctaaacttttagcagaccaagctgaacaaactaacattcgtgtttttgttgtaaatccaggtacttcgcaggctgagtgtggtgtttcttactgccctgaagacgccgttgaagcgactgatattcgtctaccatttaatggttttgatgccattgttgatgctgaaagtgcccctttcttggaagaagctgaaatcgattttgtaactgacaaaatgggtactcagttaacacttaaagcaccaaatgcaaaagcacgtaaacttagcgatgatgcgtcattacaagagcgtgtacaacacatgcttgaaactgaagtgaacccacagctcgctaaccacggcggccaagttagcctagtagaaattactgctgacggcattgcagtactgcaatttggcggtggctgtaacggttgttcaatgattgatgtcacgctaaaagaaggcatcgaaaaagaaatgattgccaagtttgatgaaatcaatggtgtaagagacatcactgatcaccaatctggtgagcattcttactactaaccggtctctaaagcatgcttaaaaagtgggtatttcgcttaggtagcgaccccaagttaagcttaaaacgctttcttcgcggcctagcactctttgtgctagccgtgatttttattgccataggctactatggacccgcattttttcaattaatcggcttaatcgtattagcaatagctttattctttgctggttggggttacctaggcatttttgccaaccggtttgcgcaagttttagaacgctcatccccaaaagatcatgaccccgatttgtggaaataatttactctaataattgctggttgttgacaattttacggtagcgaaaccaaagagttaatccgcgcattagcatgaagctggtcatcgcaaaccataaaccatgattttgccagctactcactaaccaaaacagcccgaaaaagcccactacagcactaaatagcatagtgttacgcatgtctttggcacgggttaaccccacaaatacgccatcaaataagaaacaccccatcgccgcaataggcaatataattacccaaggcaagtaatcggttgccatttcaataacttctggaacatcggtaagtaagcgaataattgcctcgccaaataataaaaatataaggctataaaacagtgcaaataacccgccccaaaacaagctcaaattaacccataacttaatctgcttagcgctgtgctcacctttcgctttaccgacctttgcctcacttgcataagcaataccatcaagcgcaaagctcaccaacattaaaaagtttagcaacacggcattagccgctaaggttgtttcgccgatacgtgcgccataaaaagtcataaaactaaaacataattgcagtgctagtgagcgaataaaaatatcacgatttaagctcactaaatcaagtaacttagcaacacttaaccagtctttcacagcaaggttaacaccttgttttttagctagttgtgcaactaacataagtgcaaaagcaagcgcaatataatcagcaattaaagatgcccacgcagctcctgcaacgccccaatcaagaaacactacaaaataaatatcaagcacgatattggttatgttagtaataagtaataaataaaatggcccccggccataatgcactcctaacatccaaccaagcaacaccaagttacataaggcggcaggtgcactaaaaatacgaatcgaaaaatagctatttgcttgttctaaaacagcttcattggcatttgataaatatgccattaaggattgaataggtatactcagcgctattaatagcagcgcaaccgctgttgctagtagcaagctgcgctttaatagctcagcaagtaagctgtgatcgtgttttccataggcctgtgcaaccaaacctgtggtactcatgcgtaaaaagcctgctagccaaaataataacgagataactgctgaaccgagtgctataccagccaaatagtgagcgcttcctagatgaccgattacagcagtatcaactaaacctaacattggcacggtaatatttgataaaatcatcggaccggctaataacagtaaacttttatggtgtgccttatgacgtttaagaaaatgtttcatgtagtatttgcagtcctgttaggtttatctttgcgtgcccatggcgcagtcattctacagtatcatcacgtcagtgaaagccttcctgcggtaaccagtgtcagcagcgaaacattcactgaacacatgcaatatttaaaagacaataacttcaaagttattccattaaatgacctcatcacctcgttgcaagcgggacaccctttaacagataaaactgtcgcgattactttcgatgatggctataaaaacaattacgaagaagctgctcctatcttagaaaagtttggctatccgtatactattttcgtaaaccctgaacttattgatgaaggcaaaagctatgtgatgacgtggcaacagctaaaagagctatcaagtaaaggcgccttaattagcaaccacacgcaaactcataattacttgcatcgcaaacagccagacgaaactgagcaagcatggcttgcgcgtactaagaacgacattctatctgcccagcagcgcataaaagaagaaattggccatgattataaataccttgcttacccttatggcgagtttaataattcattacagcagttagttaaatcactcgggtttgttggtataggtcagcattccggtgctgtagggatccattctgactttactcgattaccacgttttccggcatcaggtttttattcaaagcttgatacgcttgccactaaactcgactcgcaagcattcactatcaaacagcttacctactcagatagtgtgacagacgaaaacccacctagtttaacgatgcaatttgatatgcaagattttcataaaagtcagtttgcttgttatgtttcaggtattggccaagcagatttagcttggcttagcaaagatacggtgaagatcacctcacctgaaaaactgaaaaaaggtcgctctcgctttaactgcacagccccttcaatcgcgaaaaaaggcagctattattggttctcacaaccttgggttatcacgcagtaatagcctgtttcagcatttgtgccgtcactttatcaaggcgcacaacttcatgagccgcattgagctccactgcggcttttggcattccccacaccactgacgacaattcatcttgtgcaattgtataagcacccgcttgttttaacgccagtaagccttgagcgccatcacttcccataccggttagcaatgctgcaacagttactttagggcaagctataacaagtgaattaaacaacacatcgacagctggacgatggcgatttaccagctcattagcatcgagttggcaatatagagcgctgccttttttaacaacacttaaatgctgatcgcccggtgcaatataagcccaacccggctttaatttatcaccctgttcagcttctttgacgttaattttacacgttcgatccatacgcatcgcaaatgaggtactaaataccggcggaatatgctgagtgatcactatgggtgggcaattttctggcatacgaaccaacacttctttaattgcttcggttccccctgttgaagcgccaattgccaaaacagcattctgtttaaactgcaaagaagttaaagatttatcatcttccaccttttgcgctttaaaggtacgtactctggcagaagccgctgtgcgtactttttgttgtaataagtgagcgtagcgttgaatattttctgatacatttgcagttggttttgcaataaagtcgaccgcaccaatctctagtgcttcaagtgtaattggcgagcctttttgagttagggtagagatcatcacaacaggcataggacgtaggcgcattaagttttttaaaaaactcaacccatccatttttggcatttctatatcaagtgttaatacatcaggatttagccgtttaatagaatctcgtgcctgataaggatcttctgcaacaccaacaacctgaatatcatcggcttgttccagtacttccttgagcaaaccacggatcaaagcagaatcatcaacaatgagtactttgatcatatgcgctcctaaaataattcaatattcgtttcagcatcttgatgctcaatatcgtgtaagtatttaatttcacgtttttcaagcttatcagaatgtaattcacgcatttttttcacctgcgctgaacctgtttgtggattaaataatacttttcgaggccaagggccacccacatcatgagatactaaatctaatccttcctcaagtatataggcatttgcaaaacgaatattgcccacccctatgtctgtcattgagcgaataattttaccgccaccgaacagtttgacttttaaattacgttttgaagcaccatttttcaagatttcattgatcagatactccattgcccagttaccatagcgacaatttaagctatgtgcattcgctgggtcgacccctttttccattggcaacataaagtgattcatgccacctatgccgagtccttcatcataaatacatgcggcaatacatgaaccaagcaccgtggtaataagttcatctgtttttgatacataaaactcgccaggcaaaacctttgcgaccactttttgtctatggttatcccaaaatcgtttaacatgctcgaaaccaggtaacacaggtttaaaatgattgctcatagaccaccttttagataaatcgtctggcctaaattcttaaactctttgtgatccttacccagtgtttccgaatgccccaggaataaatggcctgagtcggtcagtaggtcataataacgcttgaacagcgtatcttttgttggtttatcaaaatagataaccacgtttcggcaaaaaataacatcaaatggccccttcattggccaaccttgaagtaaatttaaccttttgaaaaatatgtttttttgtagctctggcttaactttgtataactgcccatcatgactttttaaaaaccagcgctttagttgagctttctctaaaccattaacattcgacgctgtgtatgttcccgcttgagctttggctaatacgttcgagtcaagatcagtggctagtattttcacatcccaatcagaaggaaacaaaccacttaatgtcattgcaatagtgtatggctcttcccccgttgaacacccagcagaccaaacacgtacacgtttatgcttagcattactcacaagtagttttggaacaatggtgttttttaaatagttaaagtgatggggctcacgaaaaaaagacgttagattagtggttatcgcattaataaactcgctaaactctcgttctttattttcttcaagaaagtctaaatattctttaaagctttttagtttatgatgtcggattcgtctggctaagcgcgagtaaaccatctcgcgcttatgttcggccaaaacaatgccacaagcatcataaacttgcgacgaaatagctttaaagtcactatctgttaataaaaactctttcatgtttttgaccctgcagcctagacattagatacactacataacctagttttttctgttaatagggaagagtattagaactcttcccactcatcgctagggtcaacaaagttattgcctttcggtgctggacgtacaggcgagttcgattgcttagccgcaggtgctgcacttactcgactcgagacatctacctcttctttcgataacgagaagaagtttaataagcgtcgcatgtcatttgcttgttctgccattgattcccctgccgcagatgcttgctcaactaaagcagcattttgctgagtcatctcgtccatttgtgtaattgctttattaacttgctcaatgccagagctttgctcttctgatgcttgagcaatatcagaaatcatcgcagtcactcgttgcaccgctgtaacaatttcttgtaatgttgaacctgactcattaacgagtaatgtaccgtcttcaacttttccaacactgtctcggatcaattctttaatttcttttgcagccgctgcagagcgctgcgctagattacgaacttcacctgcaacaactgcgaagcctcgaccttgctcacctgcacgtgcagcttcaacagcagcattcaatgcgagtaaatttgtttggaaagcgatttcatcaataacactaatgatatctgcaattttcttacttgattcgttaattgcagacatactcactacagcacggtttacaacttcaccgcctttttgtgctttcgtgcgtgtttcttctgccagctcgttcacttcttttgcgttatccgcattttggcgaaccgtactggtcatctcttccatactagatgctgtttcttcaagtgatgaagcttgctcttcagttcgttgacttaaatcagcattaccttgtgagatttcttctgcgccacttgcaaccagagttgctgaggtattaatgcgattaatcacttcagtaagcttatcagccgtggcatttgcatcacgttttagcttctcaaatgaaccttggtagtcttgctcaatacgttttgataagtcaccattcgccatggcatccagcatattgcctgtatctttaactgcatcatcaacaatgcttacaaggctatttaaaccttgcgctaaccgtaagaagaagccttgtttacccgtctcttcaacacgggcttctaagtcacctttacctgcagcagaaacaagacccgcaatctctttttcaatcgcgacttcagccgttctatcttcccactcaacaacagtaccaatacgctcattttcaggagtgaaaatagggttcgcaaccaaaccaaaggtgcgaccaccgacttgaatttccgtactgtaagtactgcttaatttagctagcatgttgcgttgatgtgccggatttttgtgaaatacatcaatattttgaccaatcaaattattgctgttgaaattcggcaagtctttccgtaaatcactttctgcgattttcatcatattaagaacggcctcgttcatataaatgatgttattcccagagtctgcaatcatagtgttagtagctacacggtcaagtgcgcgacgtacgcgcaaattctcttccgcttcacgtttttcagcttcggctttattcactcgatcagtgatatcttgccattcaacaattgttcctaaacgcttacctgatgcacttaaccaaggcgttgcaatcaggctaaaaataagaccagccaaacgtaacgttgttttataaggttcttttaatgatttcaataactcacgttgatggcttggctgtttatgaaaatcgtcaacacatgtaccgattaagttagacactgaaaagcttggcagcactgtctgtaaggtcgactcgcgtgcttgtagcatttgttttacttgctcattcacgaatataattttcagatcgttatcggcaatcatcacattcgcttggcatactcgtaatgcattagacagatcagcatcacgtttcgattgtttttctaactctttctgtgcggagatatcggttgcaaatttgatgactttgatgacattgccgttaccatcaataatcgggttatatgtggcttgaatccagatttctttgccacctttaccaaaacgtttgaattcgtcagaaataaattcaccgtttcgtaagcgctgccaaaactgctggtactcagggctttttgattcatcatcagcgacaaatatagcatgatgttgtccctgaatttcttcaagtcgatagcccattacgcttaaaaaattagcattggctgtaataatcgatcctgtcggctgaaattcaattactgcaagcgacttgtttagtgccgtaacaattaaatcattgttcgactcaacatttttaggactgctaaaccaacccatacccttcaccttcttgttaatctacccagttaaatgtccattgttttttgtaggtccaatagcgcaaccattttctcacccacattgaccaaacccgcaacatattgcgcattatctgagtctgacaaatgcggcaccgctttagcttcatgctcagcaatgctatagacatccgaaacagcatcgacaacgatgcccataattttactcgcgttttctaactttacttttaaaacaataacaacagtcaatggcccatactcaatggctggaataccaaagcgaagtcgcaaatcgataataggcactatggtgccgcgcaaattgattacccctttaacaaaatcaggggagttagggattacagtgatctcttcccaactgcgaatttcttgcaccgttaaaatatcaactccgtactcttcttcagccataaagaaagttagaaactgttttacatcttgattttgttctaaattaagcttgttatgcaggtcatcgtgctgtgctatcatgatgcctccaaattcgcttttgactcgatgattaattcttggctgccaggttttctcagtcctgacaatttaattaagccactaatatccacaattaatgaaactcgaccatcgcccaaaattgttgcccctgagacaccatctactttttgataattagcctctaaactttttataacgacttgttgttgcgacaataagtcatcaactaacaagcccactttttggttatcgctttctacaaccaccagcaaggtcttatccaacgtttcaatcgctccttggtgattaaatatgttgtacaaccgtaaaataggaatgtattcatcacgtaagcgcaatacgtcgagatctttcccaactcggctaacttttgtgatatctatttgcagtgactcgataatcgaaatcagcggaataatataagtgtgctcggcaacacgtactaattgcccatcgagaattgccaacgtcaatggcaagcgaattgtaaaggttgaaccaacacctggggcagatgacacttcaacagagccactcagtgcttcaatattgcgacgtacaacatccatacccacaccacggccagacaaatcactcacttgatctgcggtggaaaagccaggtaaaaatataagctcattaacttcattgtcagataaatcatctgattctgagatcagaccatttttaatcgctttttcacgtattttggtagtatttaggccttgtccatcatccataatctcaatcacaatattaccaccttgatgaaacgcattaagtgtcactgtaccaacaggatccttacctgccgcaacacgtttatctacggtttctaagccatgatcaagagagtttcttacgaggtggaccataggatcagacagcttttccatcactgttttatcaagctcggtttgttcaccaagtagtttcaattcaacctgtttatcaagcttttgtgagatatctcgaaccaagcgcggaaagcgactaaatacaaaactaatcggtaacatgcgaatacgcatgacgttttcttgtaaatcacgtgtgttatgtgccaattgagccaaaccttcttgcaacgaggcgatcgttgcttcggttatctcctgctcaccaagctggcttaacatagcttgtgtgataactaactcacccaccatattgatgagtgaatcaactttgtcgataccaacccgtatagacgttgactctgcatttgcggtcgccgtttttactggcgccgcttttttagcatcagtacttgctttagcaatcggttcaactgtgttggtgttcgtttcctttgccggctcacttgctgatgatggctctacctcagcaccaaacaaacccccacacagtgtaatagagatatcggcatcatcttcgacccactcaaagatttcttcaatactgctttgctctttgtctgtggttaagaagaatcgccaggctaaaaagcaatcttctggtgcgtaattagtaatgtcgggaataccatcttgaaaagcatgtgtttcaagctcaccaagttcagctaactcgctgatcatataaagaggttcattacccgttttgaataaatgatgatggggtttaaagtcgatttggtaagtattaaagctgctttcggcaactgtttcttcgacttgttccgatgcctgactcgctgcacgcataccaaggatttcttcaaattttattcgaagttcatccgcttccgctaaatcaggttgttgttcagcttgtaaggctctgagtaatgcacgtaaacaatcgactgactttaggagtaaattaacatgttccgctgttaagtctcgtgaaccttcacgtatttgatctaacagagtttctaggacatgagtaaaatctgcaacagcactaaaaccaaaagtaccactacctcctttaattgaatgcgcggcacggaaaatagtatttatagtttcctgatcttcttcgccgggaaccaagtttaataactcagcttccatcgcatcaagtccttcaaagctttcttcgaagaacacttcaaaaaattggcttagatctatactcatgcctcgctcctattgttagcgaatcacttttttcaataccgctaacaattgctctgggttaaaaggtttaacaatccacccagtagcacccgctgctttaccttctgtttttttgtctaaacctgactcagtggtgagcattagcaatggcgtaaacttatagttaggtaagctgcgtaactcgcgaatcagtgtaataccatccattaccggcatgttaacgtcggaaatgacagcatcaaaaccttgctgtttggcaatacttaatgcctcactgccatcttttgcttccgttacatcaaaccctgcctttttaagcgtaaagccaaccatttggcgcatagatgctgaatcatcaactgctaaaattcttttcatataaacctcttaattggcattttcaagcacaagataatggcctaaacccaaactatttattgcctgctgcaatggctcgctctcgcccacccatataattttatgatgcacagagagtaaatgtttttgtaacgcacataacagctgaaccgacgccgtgtcagcccgagtaacctcactaatatcaagacagatatcatcgtttgcagataattcatgcagtaaatcttgatgtaatgactcgacctgagtaatagctaattctgtagggagctttaacattcttaatactttccccgttcaaagcaactcataacaaaagcttagtcctagttaatgaaaatgccataatttgaatcaaaaaatagtaaaattttttagtagcttagacatttattgcaaaaaataaagcttttctttcgagcaaacttttacaaaatattaaaaaaatcaatttacgtaataatctgcaatttttcggaactcttcagtcaatgtcgtggcgttgattaatggcacactaccagccttaaactcaggcttaaaaatagcccgaacggcgccgtttgcatcaaccatcaccacagaggcactgtggtcaacggcatattcctgctcatcactatcattaattgcgtaaattaagccaagctccctaacaaaggggaaaagttgcttatgggggcctgatacagcaagaaactcagggttaaagtaatcaatataggcttttcgtttttcagtggtatcgcgctttggatcaactgctacaaaccacacttgcacttggtaatcttggcttaactgcttttgtactgctgttaactttgccaatgtcattgggcaaatatctgggcaactggtgtagcctaaaaagactaaattccaatgtcccataaactggctgttatcagtgggctcaccatgttgatcggttaataaaaacggactaatcggctttgcttgctcatacaccagtgcttcgacctcaggagcggtgttgcttttaccacaaccggttacaaacactaccgcactcaaacacaaaaaagcgcctattcgagtcataaaactaaccatttatcaataaataaggcgatgaagagtagcattaaatggacaattgaaaaacgaaataaatccattgcggtgtcatctttaggggcaatttttagtttcagcgctttgtaaataaacaccgtattcaaggcacatgccgcaagtaagtaaattactcccgacattccaatcaggtatggtaatacgcagaccaaggctaacaatattgaataagctacaacgcaggttttacaaaattcaataccatgagtcacgggcagcattggaatttttgcccgttcataatcgctttttcgagcaatcgcgagtgcccaaaagtgcggcggtgtccaagtaaaaataatcattaccaacagccaaggcgctgctgccatgtgacctgtttcagacacccagcccaataacggtggcatcgcgccagctaagccaccaatcacaatattctgcggtgttgctcgctttaaaaaagaggtataaataaaggcataaccaaccagtgcaaataaagttagcacggcagttaatgtatttgcccagactatgagcatagtgaaaccaagtgagccaattatcgcagcaaaactcagcgcatgctgcttacttaaacgtcctttagcaacagggcgatgacgggttcgcgccattttgctatctatttcactatctacaacatgatttatcaccgctgctgccgcagataacaggccaattccaagcaaactggctaattgaacaaacaaccctcgccccacatcaggcgcaagcgctaaaccgacccatgcagttaaaacaagcatagcaacaactttaaacttactaatggcaagataatccttcaatcgctctgttgattgactgattaacgacttttctgtgcttaataatatcgccataatagcctcctaagttcttgcttttaaatgaaagcacagacgtaccatgctcaacaataacagtgcagccatcaggttatgagcaagcgctacacttaatggaaagtgccaatgcacaacagcaaggccgagacagatttggcacaataaggcgactaatactgttactgtacaatgcttaatttttctggaaaaactctgtgaatatatacgccacataataagcgctagcaccacacaagtgactaacgcccaaatgcgatgcagtaagtgaatcgacatacgagcctgttgtgacagcacaccatactcgtaagtgctatgttcaagtggaagctgaaacacactctttaacgaaaacggttgtccgtagctacataaaggtaagccattacaatgaggagctgcatagtttgcagccaaccaaccgcctaatgcgatttgtaaaaccaaaaccactaaaccaacaagcgctaagcgataatatggtcttgctcctgcatcacctcctgcaatcggctttgttgttagccgtaaataaagaagaaaaagcaaggatagaatactaaagccgcctagcaaatgccccattacgaccaagggttgtaaattcatggtgactgtccacatgcctaatgcagcctggaaaatcaccagcagtaatagcgctaatggcagtttaactggcgtatttggatattgacgttttaaccatgcaaaaacaaacaaagctagaatcagtagaccaagggcaccagcaaaatagcgatggatcatctctttccaggcttttgctgcctcaaacatcatatcagggtagttttgttcaacatgtaacagagcagtttcatgttttggtacagtcaaaaacccatagcaccctggccaatcaggacaaccaagccctgcatcactaagccgtgtataagcaccgagcccaacaaccaaaatagaaaagaaaaccgtaattaagactaaatatttataatttttatacatctttatccccttaatgaggtttaacttgaacgcgcatagttaagtagtttttttaaatctttaagtaagcctttttgaataagtctgttttgttcgggctcagccgtataggggtaatgcaaaaccaccaagcccatgtgatcaaccaaatataagtctcccgctttgagcgctggacttactgctaattgacgccaattagccgatacctgctgttgattcgtcagtaccgccacatctactttttgctgatttttccctaaagcgacgtagaggttgtctaaacttgctaattggttttcacacacttcactgcactcttttggataattgagcgcaatagtccattgtttaggctcgccttgttgccaatcagctagtttcacttcctcccttaaaagctcaccatgattactcgaaccactcggtaaccactcaagctttaatgctgcataagcaagtgccagcggcacaaagcagcataaaacgaataaactaagcgggtttattttcataacctctccttctcatcgcaaaataagcaataaccacacaagccaagccaattaataaccactgcacggcataggcgtaatgtttatctggtcccatcacaacactctgataatgcggggttgctataccatctgcttcattgcgataaccaataaagccttgtaagggctttgctaattgagcactaaaaattgctaaatcgatgccttgaatgcgcttgggccagccttgctctgcaccaatatcatcggcaagtgtaaaaccttgtaagttgccttgtttcaattgcactgtggccgtaagccttgttgattctggccacacaacggttggcaactggttacggtttgttggagcttttagccaaccaaagttaacgattaaaggtgcggtttcacctgcaattgtcatcgcgactagtaagtcatagcccacttgcccctgataaatttgattatcaagtaaccagtactgctgtttatttacctcgccagagaccttgacttgcaagcccgttttattcagctctctaggtaaattttgcagctcttgccagctcaaaactccttgctctttcgaaacggctaactggcttagttgctgctgtttttgctcgcctcgctggtattgccaaacgcttagtcgtaaacaaataagcactgcaagtatcacaacgcaaattgcgataattgagctaagcttttgtttacgccataaaattaactgcatttggaatacctaatatgattaaaatcattattgttttgttattactttatattctgttcaatctatttagagcgctgtttgtgatgatgtcagcaaaagagcactcgaaacccatgtcgcattacttaggtcgtcgggtgctgttttcaggtattgtgctgctcctcattattgccgcaatgaaattgggctttattcacaccaacccgtcgccgcttcacaaagctacagcacgtacacaaatacaaataaacacaaccacaccacatctacaaagtgccaataccaagcagccgcttgaaatgcaaaatgcttttcgctcgtaaagtggcctttaaaaattcttagcagtacgacaaataaaataatggtcccaagcgtcacatgcatgccatgaaaacccgtcaataaaaagaaggtatttccataaacgccagcatccagtgttaaacctaaatcttggtatgcatgcatatattcatacacttgcaaacccagaaagattgcgcctaatagcacggtaagtgataaaaatgcttttaaagcaccacgcttattgttttccattgcaacgtgagcaaagtggatagtgactgatgaggtgagtaggatgagcgtattaataagaggtagaccttgccaccccattgcttgagttgtatcacctgcaggcgtagttaacaacggccatactgcttcaaacgttggccagagtacctcattggtcatggcattatttccagcaccaccaagccaaggtactgaaatcatacgggcataaaacagagcaccaaaaaatgccataaaaaacataacttcagaaaaaataaaccagctcattccttgtctaaatgaacgatccatttgcgctgaatataaaccactgtgtgattcttcgatgacgtttttaaaccagctaaacagcatgtaacatagtatcgcaatgcctaaatacaacacatattgaccactgctagcttctgcgctcacttgcatcactgtcaggcctgccccgacagcaattaagaacattgcaatcgcaccaactattggccatgggctctgggccggaacataatatttttcgtaattttgactcattttgtttgctcccaattagcaattagcttggcggcttaatcgtttttagccacaacttgcccgctaatatcaaacacggtataggacaatgtcagctcttctacatcgtcgggtaattccgtatcaacataaaacaacaaggtaaactcaacttcttcgcccgcttttagtggttgttgatcaaaacaaaaacacgcgattttatgtaagtattttgctgcttttcccggtgatacagacggaatagcctgcatcactttgtcgttattactggtgttttttgctgtaaactttacttctcgcatcgctcctggttgaacaaccacactgtactgagctgattgcacatcaaaaggcgcaccactttgcgcatgcgttgtaaaactcacatcaacttgacggtctatgcttaccgtttcactctcttttgcttgttcgagtgatggcttaccatttaaacctgtgacatcacaaaacacatcgtaaagtggcaccaatgcaaaggcgaatgcaaacatacctaagcatgctaacaacagctttttgagcaaaggtgcatggttcattatttgatctccggcggtgtttcaaaggtgtgatacggtgcgggcgaatcaacttcccactctaaaccttctgcaccgtcccataccttagcaggtgctttttcgccgcctcgtgcgcatttaaaaacaacaagcacgaacagtagctgtgataaaccgaaggcaaaaccaccaatactgataatggcgttaaagtcagcaaattgaagggcgtaatcaggaatacggcgcggcatacccgcaaggccaacaaagtgcatagggaagaacaacacgttgacactgatcagtgatagccagaaatgccatttcgcaagtgtttcgttgtacatgttgccagtccatttaggtagccagtagtaggctcctgccataattgagaacacagcccctgtcactaatacataatggaaatgcgcaaccacaaagtaagtatcatgatactggaaatctgccggtgtaatcgccagcatcaaaccagagaacccacctaaggtgaacagcacaataaaggcaatggcaaacatcatcggaatttcaaagctaattgagcctcgccacatggttgcaacccagttaaaaactttaaccccagttggtaccgaaatgagcatggttgcatacatgaagaacagctcaccggctacaggcatccctgtggtgaacatgtggtgtgcccatacaataaagctcaaaagtgcaatcgacgaggtcgcatacaccatagaagcgtagccaaataacttcttgcgtgagaaggtcggcacgatggttgaaataataccaaatgccggcaaaatcatgatgtacacttcagggtgaccgaaaaaccaaaagatgtgctggaacatcacagggtcaccgccccccgccgcatcaaaaaagctggttgcaaagtatttatcggtcaacaccatagtgaccgcccctgctaaaacaggcatcacagcaatcaacaaaaatgccgtaataagccaagtccacacaaacagtggtaacttcatccatgtcatgccgggcgctcgcatattaacgatagtcacaataacgttaatcgcccccatgattgaactaatacccatgatatgtatagcaaacacaaacaaggctgtattatcgttactataggtcgttgaaagtggcgcataaaaagtccaaccaaatgcagggccaccacccggcataagtaacgaagccaacaagattaaaaacgcgaatggtaatatccaaaaactccagttattcatccgtggtagcgccatatcgggtgcaccgatcatcataggcaccatccagttagcaagccctgtaaatgccggcattaccgcaccaaataccattatcaaaccatgcactgtggtcatttggttaaaaaagtgtggatcgactagttgtaaaccaggttgaaacaattcagcgcggatcaccattgccatcgcgccaccaattaaaaacatagtgagcgaaaatatcaggtataaactgccaatatctttatgattggtggtgtaaagccaacgtttgaaaccttttgcaggatgatggtcatgatgcgcatgctcagtggcttgttcattaataacgttgctcattctttcgcctccgttgctgcatcgatagctgcttgaatttgacttggttgaatcacatcgcctgtgtcgttaccccatgcatttcgcttatatgtgataaccgcagcaagttgcttaattgaaagctgtttatcaaatgcttgcatcgctgtacccggcttaccatgtaatacgatgtcgatgtggtcttttacatctccaagcacaattggactccccttaagagctggaaaaactcccggcaagcccattcctgtaggctgatgacaagccgcacaacttgccatataaacttgctccccaagaaccattaattcttctttcggtagtgtttgatctaataaagccgcatcagctgctgcagcattggccttttcttgcttagcttctgctagccagttagcaaattcgtcttcaggcaacgcttgcacaacaacaggcatgaaaccatgatctttaccacacaactcagcacactgaccccggtagatgcctggctcatttatgcgtgtccatgcctcattgataaagcccgggtttgcatcttttttaaccgcaaagtcaggcacccaccatgagtgaataacatcatctgaggtcattagaaaacgaacttttttattaataggaagtactaaaggcttatcaacctcaagtaagtaatgttctgttttgtcagcttggttatctatttggtcttttggagtagatagaattgagtaataagcaatttcctcgcccatgtactcgtaatgccatttccactgtgagcccgttactttaattgtaatatcggctttagaagcatcttccatcgctatcagtgtttttgtagctggaattgccatggcgattaagatcacaaatggtatggcagtccaaagaatttcaaccttggtactttcgtggaattgtgcaggcttggctcctttcgactttcgatggtggatcaaagcccaaaacatcaccgcaaaaacgatgatgcctatcacacaacagataataaatatcgtcatgtgtaattcataaacactattacttatatcagtcacccctttacgcatattaaattggctatttgccaatgctaactgcacaggtgcgagtaatataagccacaaggcataacgcagtttacccatgtgacggctccttttaatgctattgcaagacgcaaagcgaaaaggcgatacaacaaggtgcccattcgttttttttattgttcagagcgactacgtatcattttgacccagcgatgataccaaccctatgtttaacacctagcacatttgagtgtatttttattaatcaggtgttaatacactgtattaaccaattagttaaaaaatgagcaataagcaagttttagtagtaataaatgtttattttggtgcaaaaataacaactataatcagcgcgttattttaaaatgagaggcagagtgagagtaaaaaaagagtgaaaaactgcgccatataaggctttatacaaagagtaagggtttacaaatcgatgctaaataataaaaaacaagcaacgcaccaaattacagcaatttggtgcactattttagaaacagttacatccagtcggcattacgaataacacccaccgctaacccttcaatattgaaagattcatgctcaagatcaacttcaattggcgaaaattcttcgttttcagcatgtaaaaatactttacgcccagctttttcaagacgcttaacagttacatcttcatcaacacgagcaacaacaacctgaccattttcagcaacttgcgttctatgtactgcgagtaaatcaccatccatgatgccaatgtctttcatactcataccatttacacgcagtaaaaagtcagccgcaggtttaaatagtgaaggatcaacctgacaatgactttcaacatgttcttgcgccaaaatgggctcacccgctgcaactcgtccaattaaaggtaaacctaattgctcaggttcgtcttcttcaattaattgaataccacgactcgccccaggcttcattttgatcatgcctttttttgccagtgcttttagatgctcttcggcagcattggcacttttaaaacccaatgtttgagctatttcagcacgcgtaggtggcatgcctgtatctttaataaagactttaattagttctaaaatttgcgattggcgttttgttaatgggcgcatacaactggttttccatacagtacatttaactgtgagtatatacagttatctgaaaatcgcaaatttaaattaacgccatcatattgctacaaaactaacattgaaccaggtataaagatgccataaggtattatttttaatttgcaggcaaggaaatacaatgagtatttggcatcaaccaatcacactagagctttgtaaaagtttagagcaagggatcaccgggcaaggtactttaatgaaaaccatgggcattgaggtgactgaaattggtgatgattatttagtggcgactatgcctgccattcctgagcatcataaccctatgggcatggtacatggcggagcgaacgtcgtgttagcagagacagtggcaagctatgcggctaactttgtggttgatttcaataaattttatgctgttggccaagaaattaatgccaaccatatgaaagcatctcgtaagggtgtattaacggccacagcaaagcctcttcatttaggtaagcgcacttcagtgtgggatattaaaattaccaatgccgcaggagagctttgctgcgtatcaagaatgaccgcagctgttgtagagcgctaagctcaggctatttttcgactggataaatcgtaatttcaacccctgcgccaatcgctgaaatacgcaacaaggtatcagcatgcagggcttgattaaaacattttggtgaaacgcctgattcaaagccaatatcaaatgtacgtttagagcacgacaaccactgcttaagagcatttcgtgaacacgattcaattaattcacacaactgattaatcgctttgtctggtgtactgatatcagcagcagcctcaatacgcgctagttgacggtattcatcttggtcgtaatgtaaaaccatggcatttttctttaaatcagcaacaagtgcactaatatcgtgctttgattcaagctccagatccacatttaaaaattgaatttccgacatactctcgtttttaccctctattgatatcgactgaaactttaactcagttttgtatatataccaaatctagaatacagttaatgcgacattatgccgcattggcaatacagttaaacaacctaaaatagctcccatacaacaataataacggagtaatgatgaataaacgcatgttcaaatatgctcgcaaagggcataaatggcttggctatctgctagccattcagctacttctatggctatcgggaggcttagtaatgagttcactccccctcgaaaaagtccatggtaaacatttagcaaaacgcagtttagataatccatttatggtggctgattacacagcatcagttgatcggataaccgcccaatttcaacaaataaaagcgattaactatagtcactttttaaatgcaccaatcattgaagttactactgagcaaagcactgtcagctttaatggtcatactggagctcccatggcaaaacccagtgaggctgaaattatcgcgaacgccaaagcacacttactgattgatgccaatgttttgcaagtacagcaattaaaacaaggaccccgcgaagctgcacataaacaaaacatatggcaagttcgtttcgatgattggcttgcgacaaccatatatttagacagccaaaacggtaaagtcatcactgtgcgcagcaccctgtggcgtattttcgactttttctggatgctacatattatggattacgacgagcgagaaaactttaataacccactgcttatcagcttctcagccaccagcgtgctgttttgtattaccggaattattttgttactgcaaaacgttcgtataaagcgtaaaaaaccagctacacgtgttggtctatcaaaataggattgccatctgggtcggtgataataaagctcgcttcaccggccttttgtattgctaaaccttgctgctgaaaatgcagagctaattgctcaaaagtagcaaactcagccaacgttttagcattttgatcccaaccggggttaaaggtcagcatggttttatcaaacattccttgaaacaaaccaattaaatgttcaccgtttttcataattagccaatgctgctctatttcgccggcaaactctttaaaacccagcttttcataaaacagcttagaggcatggatatcttttacatttaaactcacagaaaaagcacctagtaacatagtagtaattcctttaatgaaaacggcctaacaactatagctgagttgaaaaacttttccttttagaatagtcactctaaaatgagctttcctgtagttcactgatgtgatggatatgcgtttgttcctctactttaccctttgtctaataatcaatttctctgtaaatgcagagcaattttcaagcttttctagtgccaaaaagcacttaataaaaaccctaccagacaatagtaaaagcctttactgtggatgtgacataaaacgccaaggtaagaaacttgtaccagatcctagtggatgtggctatatacctcgaaatgcaatgacacgttcaggcaaagaaaatgttcgcgcaaaacgaattgagtgggagcacatagtacctgcgtgggaattcggccatcagttacaatgttggcaaaacggcggacgcaaaaattgccgaaaagtcagcgaaaagttccgtaaaatggaagctgatatcaataatctggcacctgcaataggtgaaatcaacgctgatcgctctaattttcgctatggaatggtcacatcccatagtcctaaatacggtgcttgtcctattaaaatagattttaagcaacgggtgtttgagcctcctatttatgcacgaaaacgtattgctgatgcctatttctacatgcagcaaacctacggattaaaaatttcagataaacaacgacagctattcgaggcatggcaacgacttgaagtggctcaagtaaatgaccgtaaagcactctagtttagagcaataatgttcataaaaaaggggcggctatctattgctatggactatagttattgatacgttttaagcaaatatttacaggaaagtaattcatatgtttaattgtaataaacttgctctagcggtgtttttggcagtgtctggcttctcattaacaggatgcggaggaggaagtggctcgtctgatagtacaactaatccgccaccgccaacaacttctgagccatcttggacggcaggagttttcgccccatcaagtgaatttaaaaaccaatgtgcggttcctcgaacaggcaatgacccttacaataataatagaccttacccagatactgctggcagtgagtttacagaaaaaatgtggttacgttcatggagtgatgaaacttacctttggtacgatgagattgaagataacgacccagacaacttcaactctgtcgccgcttattttgcgcaattaaaaacatatcaaacaactgactcaggggcatataaagataacttccacttcagtcgcccaaccgaagagtactataaagaagcacaatcaggcgtggtttctggctacggtattaactgggcatttttaagcaatgtcccccctcgtgaattacgtattgcttatttagaagatgattcaccagctaaaaatgtcggattacagcgcggtgatactattttaatggtcgatggcgttagtattaacactaatacccaagaaggcgtagatattttaaatgaagcgctttttggaccaacagcgggtgattcgcataactttgttgtgcgcagtaacgatggcagtgaaaaatcattcacacttgtagcgggcaatatcgcgcaaacacctgttcagaatgttaataccatcactaccgccaatggtacaaaagtcggctatatgcaatttaatagttttattagtattgctcaaccagagctaataagcgctgttaataagtttaaaagcgataacattgacgagctagtaattgactttaggtataatggtggcggcttattagcgttatcatctcagctagcttatatggttgccggcccagctaatactgatgactattactactatcaaaccatcaaaaacgacaagcaaccacaagaggctccttacccatttattgaccgtgaaatagattactctacatttcaaacaaccaatagccgacttcctgatctcaacttatctaaagtatatgtactaagtacagcaggaacttgttctgcgtcagaagcgtttataaatggtttaaaaggtatagatgcagaagtcatacttattggtgatacgacctgcggcaagccttatggctttacacccactcataattgcgccaccacttactacactatccaattctctggagctaatgataaaggctttggggaatatgctgacggttttaaaccaactccttcacctcagtttgatgcagatgttaaaggctgtgtagttgctgatgattttgataacaaactaggtgatacacaagaacgcttattttcaacagcaatacatcatattgagaatggcagctgtccaattgttgtacaaacaaatagcatcaaacaaccaagctatgcctctcaagcagaacaagccagtggaatcccactttcttataaacaaccgctttataaggaaaacatggacttaacacgtccatcaccggctaaggacgacaacaatgaacaataaagcacttttcacttgcgcactattagtgagtttaacgggctgtaaaagcacccaagcagaggagccacaaaacgccacgttaacgcgcgtaaatcctggcgtaatcactgaaatacaacaagcgattcaatcagctaaagggggcccattggttactttagctgataacgtgtttactaaaagtgctgaactattgatagatcatgggacaaataaagggcccgaaggattgccaattatgggggcgcatagtatcccttcagaaaaatttgtgctgcaaaaaatgggtgaacagtgtttgctctattacccaaaaaaagagctgcgagtaccactaccaaatgtagagtgtgaagcagaatagacaataaaggcgcagtaacacactgcgcctttcgttgttttataactgttgatgagggccaaacacctcataatgaattcgctcacttgcaacccctaaactaagtagctgctcttttatcattgccataaatgcgattggaccacacaggtaaaaatcacctttactaattggtaagctagcagcaatgtgatttatatccatcaaacccgcaaaatctccccccttgccatctttaaaccaagtaacacaatgtaatgaagcgtgcgcttgctgttgttttaataaatactctttaaaggcaaactgcgtctcactgtcacaagcatgcaggtaatgaattggctggttatgttgattacttaataatgtctcgagcatggccatcattggggtttgaccaacacctgccgaaatcaacacgacaggaaaatcaatttcgcgaagcacaaagtctccagcaggtgggtaaatctctacctcatctccctctgttaagctatgtaagtaattagatactaagccttcttttttcacgctaattcgataatttcgaccgttactttgttgcgacagtgagtattgcctaacttgagttaagtcgctgtttgctggcgttacttttatccctaaatattgacccggtaaatacgccacaacaggttttgcatcgacaggtgttaatgtaaaactacatatttgcgctgattccatccgtttttctgtaatggtgaaagtacgagtaccgaaccagcctcccggcgcctttttggtcgtttggtataacgccatctcttcggtgatacatacatccgctaataaagaataagcttcacgccatgcgtactcgacctcaggggtaaattgctcaggcagtaactcttttaaagtcgcaatcaaatgcccaccaacaatagggtaatgctctggcaaaatatgatagctggtgtgtttgtgattaatgcgcgcaagcgctccttttaacactgccaagttatcaatatttgcagcataggccgccaaagcattaaacaacgcgaattgctgagtgcccgattgctgatgtgtcatattaaaaatatttttaagctctgggttgtagctaaacatacgatcataaaaatactcagtcacttgagggcctgcttgtgcaagcaaaggtaaagtacttttaacaatctggatcgttttttcagataacatagtttttcctattggagagattaaccgcggcgaccatcaacacgacgattgactaaaatgggcgcacaatgaaataaaaataagctaaagccagcaatccacagcaacgcacttaactgccatgcaaggtgatgacctaaataaacgggaagtaacgaacgtacaatggcagctaacgcaatgagtaaaaatgccaaactaataaacgcaggggcttgtaatgcgcgcccagtatgaccgtgagagacacgtaccatcatggcgatgatcattaaaccgatggtgccaacagtgatcagatgaagcgcatctttgaataagataatagggctgaaataactgagcgcgataagcacaaaaccaaccgataaagcccaataagccaagtgtaatgaccatagcaaaggcacttttaaaatccctttatgccaccacacaacacaccgagcaccatgtaaacaagcaagccaagcaaaaacccaaccagtactcattgcgctaaaaaatagctgactcataaagaaccatgcaatggcgaacaatgagctaaataggactaatttatcgagcttggggattctaacttgttcgcttaagttaagaccgcgcgcggtaaaaaatggcacaactcgcccagcgacaacaccaaccagcagcgtcatgataagtacgccagtatcaacaacccccagtgccagcgacattttattaagcacaactaaactcaaaaaaatcacattgagtgcacagagcaaagatgcgatgacaataaataaatagttatggcggcttttcgcctgtatcagcatgtcagctaaaataacaattccagccagccaccaaacgagttgtaatgcacttgcaatataaaggtttagctgctcgtaccctgcaatatcaataaaaaaactaagtcgtgcagcaagccaaattatgctcagcaaacagagcttaatgccacttacactcgccacgcctgtccaagtttgtgcggcggtgagcaaaaagcccatagcaacgacccctgcaaagccaaacagcatttcgtgggcatgccaaagtgttgcgggcattgttaggtgccactgtgcataacccgccaagactaaaaaccagtaactcattgcaaacacagctaaggcacccgctgccaagaaaaaaggccgaaatgctaatgcccataacggccactggctgagttgataaaatttgattttagctggcataggttcagttaaattaatgactttcattagtgctctcagggtttaatttccctagctaatgcacagttcaagccagaaataaaaaccattaaatatcaggtaattaaactttaacgcttgataaaaaagtcaaaatgacacaccattaaaaacatcaaaaaaacacattcaggtcaaattgacatggcgctcaaaaaatcccttcttgatgttgctcttgcccttaccaaggcaagcagagttgatcataatttcagttatttgttgagttgcattaatgattggcttgaatgtgatgccgttgccttgttattgaaacaaggtgatgtgttaaagcccgtagcccagcatggattgtcggacgatacgttaggaagacgctttaaaatagcagagcatcctcgcttatttgaaatatgccgtggcagtgagccgcttaaatttgccaaagattgtggcctacccgatccctacgatggtttattacaaagccagcatggagactttcctgttcatgcctgcatgggtgtgccgctgcagagcagcaaagacaacactgaattactcggtgttttaacctttgatagtttagatgaacatgcctttgacgctttaacagtgaacgagctcaatcaactaaaacagctagcagcaggctatgttgagcatgccctaaccttgcagcatcttatgcaacacgcacagcacagtcatcaagttgcacaacagcttaatcttgaagcgctaacacgagaaggtgtcgaaattattggcaatagccaagcaatgcagacccttaaaaatgatatccagctcgtagctgcctcagaatttagcgtattgatacaaggcgacacaggcgtcggtaaagagctggttgcacgcaatatccatttaaactcaaaacgccgtgatatgccgttgatccacttaaactgcgcatcattaccagagaacttagccgaaagtgaattttttggtcatagtaaaggcgcgtttactggcgcacatactgcgcgccagggtaagtttcaacttgccgatggcggcacgctatttctagatgaaatcggcgagcttccgcttgcgatgcaaagtaagttattgcgcgttttacaaagtggtgaagtacaaacggtgggagaagaccaaagccgttatgtcgatgttagagtgattgcagcaaccaaccgaaacttaaaacaagaagtcgctgcagggcgctttcgtgcagacctttatcaccgattaagcgtctacccattgcatgttgcaccattaaaagagcgcgacaacgatgttattttactggcaggcttttttgttgagcaaacttctaaaaaactaggtattaaacaacttaagctaagtagcgatacacaattactgctgcgccaatataattggccgggcaatgtgagagagcttgaacatgtgatcagccgcgcagcactcaaagccaagcaacagcaatggcaacaaagcattgtcactattgagcctgagcattgtgatattgctaaaacagcggttgcaacaccaagtccaattgctgttaacgaacaaaaaaccgctcgcttatcgctgaaagaggcaaccgatgcgtttagctatcagttgattatgcaacagcttgaactacacaacctcaactgggcagccacagcacgcagcttaagcgttgatagagccaaccttgtgcgcctagccaaacggctaggcattagcgttaaaaagtctgtttaagcttttaacgctttaaaatacgcttttaaaagctgactaaatgcttgtactttggctgtgcgatgcaccaagtgatgtgtcaccagccaaaggtctgttggccagttcagttctttaggaagcactggcaacaaatcagggtattggcttgccacttcatgctgtaaaccaccaattcctaagcctctgacaatcgcccgtgttgcttctgatgtttcagacacccttaacttaatttgcgccggctcaatgtgctgatctacccatgcaaaataagggactttaccgttatagccagccaccccagatacaaaactatgctgctgcaactgctgaaggttttttggcataccatacttttcaatatagctcttagaagcataaaatcctgatgaaagctcagctaaatgctgggcaatatagtcaccttcgtcagggcgagggcccgctcgcacagcaatatgcgcttgaccgtggtcaagacgtaaacggttttgatcaagaataacttcgagttgcacttgcgggtgcaaactttgaaactgctcacacacatcgctcagcacatcaataaaaccactgaccgtagttaataataaactgcctcgcaattggctatctgcagcaacaatatcgttatgaagcttttcaagttcagcgttaatcgatttcgcagtggtaaacaacttagcgcctatttctgtcactgtatagccacgggcatggcggtggaataaccgcgcatcaaggttatcttctaaattgttgattcttctaagcactgtgctgtgatgaacacctaacgattcggcagcagcggttaacgtgccgagtcttgccacctcgtaagcgacttttacatcttgccaatcatcaaattgaatcgccataacggctccttgtgtgcatatacgcacataagttttgcgttaatttggcttttctgcaagctgttttttgctaaagtgagcatatcaacagtgaagcttaaaaaaaggaagccatcatgacagcaccaaaaattattgccctagcaggcagcctacgtaaagacagctttaatcaaaaactgattaatgaagctgcacgcttcgccctcgaaagtggtgctgaagtagaagtgattaaattaagtgatttagacttacctttatttgatgaagatattgaagcgcaaggtacaccagctggcgcacaattattaaaagataagcttcgcgcagctgatggcattttactagcaagcccagaatataatggctcaattacagcgccacttaaaaacgcaatcgactgggcatctcgtacagagcaaggtgcagtacctgcatttcgcaataaagttacagcactttatgcagcttcgccgggtggcttaggtggcttacgtggtttaaatcacgtacgtgatattttatcgggtattggtagtttagtgcttgccgatcaactcgcagtacctgctatccacactaaattagatgagcaaggccgcataagcgatgctgatacagccgaaaaagttgctagccttgcccagcaacttgtcagcgtagcgagcaaattaaataagtaagcctgatttaataacccttagcttagctttgtcgctgctagcttagcagcgataaagtcttcatgggttacatacagcaagcttgcgacgcggcgaataaccatttcttcatgcttatctaaattgccatcagcgtaggccaaacgccacaacagctcgataatatcaatacgttgctcggcactgcactgagcattaatttgcttagaaaactgaaagtaatcaatagcatcatctaagctttgtgaagcaccatcaataagctcttcaacagcttcatctgttaaagaaaaatatttttttaaggtctcattcagggtctgttgctcatcatcctgtaattcatcatcggcacgcataacctcaattaacagcgcagcaacagcagttttgagatcatgctcactgatactagattgcgactcactcatagttgaaaaaagttgttttattttgttgagcatcacatttgtcccctatgggtgttagactacgtataagacattacgttaccttagtttgactatggatgctaattcaggttcaacatcattatgaaacaaggttttaatcacatggagttaagtgtttatgagtgaagtgagaagtacaccagcactattaattagcgcctttttaatgttagtggtttgcagtaatgcgcacgcagcaaaagacgaaacagaaaagctctacgatttcgacgaaaaggtgcactactatcaaaccaaactagcagatggccgctatcatctagaaattcaatcggatgattacgcacacttcaaaaaccaaagcgtttttttattacgtcacgcaagtcggctctgtaaagatgaaccgtttatgttaagagtgactgatggggtgcaggagtatgaacgttttccaactaaaccacgtgcctatcagccacctttaacggttgttttgcaatgtgaagacgaagctaaatagtactagtcttcatatccccatggtgcgcttggcggcgtaataggtttagttaaatcaaaatcaacgcgaaactcacgtccttcacgtactaagcgatacgtaaattgctttggataaatatacatttgccacgtgttacccattgattggggaataccttggcttgcaaacaattcttttgaatattgatcagccgggaatgactgcgcattagcaaaccccgcatcaagggtatgaccaccatacatggttgatttgtcatcgctgccatcttcatggcgatgatcatgctttaaactaagtccactgcccgtttttgtgatgatccaagtacgagatgcatcatcacccacatgaaatggcacttgtaactcacgctcgttacaacgacgtacatgcattactaactttttgcccgcaaacgagctagggcctgcagcgttatcaacgctcactttaccttcgtaagctttaccgcaatgggccgcaatgttatcaaaaaagccgtcatggcttggaattgacactaacggcgcaggtcgtgcagccgctactgatgatgctgctacgagtatcgatgccactaagtatttcatggtgtgttcctttatttgaattataatgtcgctagcctagcctgcccctaagcagaaaggaaataaattagctaaacaacctaaaaccatctggtgagcacgctcatataccgccaacaaattgcaatataaaacaaccactaaaaatgactgcgctcatacaaaacaactaaatcattaattcttaaaaggatttaaacacatgagtatcatatgcagaaatagcacagacaatttaaacagctgagttattttattttgactactagactaataaagagtgccaatcaccaaaagcaaagcttctatcaatcataaccttacataattattggctaaaatgttcccaaaaataaaaacgcggctctcgccgcgtttaagttccacatgtaaaacctacttattgccaaggacgctcagctttaagttgctgctcaaaggcatcaatttggctgttaagtgtttcagtcacaccgataaagtctaagccgcttaataagcgctctttaatatcatggcgaatatcaaagtgaatagtgtcaaacttatcgctacgaagctgttggttttctaaatcaacttcaatatgaatatcatcatgctgttcactcagcacaaataattgctcaagtgtttctgctggtaatgcgatagcaagcatttggttattgccgcagttattaaagaaaatatcggcaaagctttccgctaagatcacttcaaaaccatattgctttaatgcccatggcgcgtgctcacgcgatgaaccacaaccaaaattgtcgcgagttaaaagaatttgcgcaccttggtaacaaggacggttcaaaataaactcaggatttggctcgccgttatctaaataacgccaatcgtaaaaaagcgccgcatcaaagccatcacggctggtcgacgttaaaaactgctttggaattatttggtcagtatcaacattgtttttatctaacggggccattaagccactaaaaaatacgctcattaggcttctcctctgatatcaacaaaacgaccatgaatagccgctgccgcagccattgctgggctcactaagtgcgtgcgtccaccgcgaccttggcgaccttcaaagttacgatttgaagtagatgcacagcgtttaccagcttctaatctgtcatcattcattgctaagcacattgaacaacccggctcacgccattcaaaaccagccgctttgaagatatcagcaaggccttcgtcttcggcttgttttttaacaaggccagaacctggaacaatcagagcttcaacacccgctgcaacttgcttgccttctacaatctgcgcggcagcacgtaaatcttcaatacggctatttgtacatgagccaataaatacggtatcaacagtcgctgaagataatttatcacccgcttttaagcccatatattttagtgcgctacgaattgcatcagctttgattagatctggttcttgctcaggatcaggaatgcattcatctacgccaatcacttgctcagggctggtaccccaagtaatttgcggttgaatgtcagcagcctccaattcaacaacatgatcaaactctgcgccatcatcagtttttagtgtttgccagtaggcaacggcactatcaaagtcagcaccttgtggtgcgaatgggcgaccttttaaataatcataagttgtttgatctggtgcgattaaccccgcttttgcgcccatttcaatactcatattacatagcgtcatgcgcgcttccatagacagcgcttcgattccttcaccacaaaattcagcaacatagccagttccacccgcagtgcctaatttaccgatcaccgccatgattaaatctttagcagttacagttggacgtaggcgaccatttatttgaatttttaacgacttggcttttttctgctgtagcgtttgagttgcaagaacgtgctcaacttctgaagtacctataccgtgcgctagtgcaccaaatgcaccatgagtagaggtatggctatcaccacacactatggttgtgcccggtaaagtaatgccctgctcaggccccattacatgcacaataccttgattaatcgaatttaaatcataaagttgaataccaaactctttacagtttgcatccagtgccattaattgatttttcgacacttcactcgcagcatctaatgagcggctttttgttgaaacgttatggtccatggtcgcaaaggttttttctgggcaacgtactttgcggtttttctcacgtaaaccagcaaaggcttgcggcgatgtaacttcatgaactaggtgacggtcgatataaagtaaatcggtttgatcattaatgctggcgactacatgagcttgccagattttatcgtataaggtttgggccacttgctattccctcattttagttacgctgagtgacgagctcagcgcaaacaatttttaattaaatacgtgccacaattgccgcagcaacatcactggtggtgtaccctgcatttgggtagatatctggcgtaccaacaccggcttcaactgcttctgctaccgctttttcaatggtacgagccgcttcatcttgacctagtgagtagcgcagcataagcgcagcacttaaaatttgtgcgatagggtttgctacccctttacctgcgatatcaggtgctgagccaccagctggctcatataaaccaaagccagactgattcaaacttgctgatggtaataagcccatagaacctgtgatcatcgcgcactcatctgacaaaatgtcaccaaataagttatcgcaaagtaatacatcaaactgacttggctgttttactaattgcatcgccgcgttatcaacataaatgtagtcaaggcttacttctgggtagtctttactcacttcagtgaccacttcacgccaaagtacacttgacgctaacacattcgctttatcaaccgaagtaacgtgattgctacgcagcttagcggcttcaaatgcaaagcgggcgatgcgctcaatttctttacgtgagtatgtttgggtatcgaaagcggcttcttgctccccttcgccactgcggcctttttcaccgaaataaataccaccggttagctcgcgcacacataagatatcaaagccttgtgcactgatatctgcacgcagcggtgatgcagcacttagtgctggtaataattgtgctgggcgtaaattacagaacaaaccaaaatgcttacgaagtggcaacaacgaagctcgttcaggttgctcgttcggtggtaagttttcccacttaggaccacctaccgaaccaaataaaatcgcatcggcattttcacaagcactaagagtgctttgcggcagtgcctgaccaaactcatcaatggcagcaccaccaatcgcgtggtgatgacgagtcaaagtaaaaccaaacttttcgcttacagcatccaagacggtttctgctgctgccataacttctggaccaatcccgtcgcctgctaatactgcgatactgtaattcgattgactcatcctgctttcctctgttgttttaaatcagacactttttgtgcacgataaattaagttataaacgcggatcatggcgcgtactgacgcttcaaccacatccgctgcaatgcccgcgccgtgataagggcgaccatcgtatttagcgataatattcacttgccccagtgaactggcaccttggcctgttgcttctaggttgtattcaatcatttcgaccgacatacccgttaagcgctcaattgctaagaatgatgcttcaacaggaccattacccgttgctgcctcttgcttagactcgccatcaattgtcatgccgattgttgagcttgccactgattgcgagttagacgtagagttaacaaactcaagttggtacttctcgtctttatctttgatttgattaaagtaaatcatcgcttctaagtcgtagtcatacacagtgcctttttggtctgctaatgctaagaaactttcatacaagctatccatatcataatcagatttttgatagcctaactcttctaaacgatgctcaataacatgacgacctgaacgcgaggtcatgtttaattggttatttggtacaccgacactttctggcgacataatttcgtaagtgttttgggcttttaatacgccgtcttggtggattcctgagctatgtgcaaaggcattttcaccaacaattgctttgtttggctgcactggcatattacaaatcttcgcgacttggcgcgaagcacggtatatttcttcactgcgaatatcggtatgcacttttaagtggtcttcacgcatcttcatgatcatcgccacttcttcaagcgagcagttacctgcacgctcaccaataccattaatagtacattcgatttggcgagcaccggcttgtaccgcagcaattgagttagcaaccgctaagcctaaatcgttatggcaatgcacacttaaacgcgccttgtcgatatttggcacattgttcattaagtgatggatcatcgcagcgtattcgtctggcgttacataacctacggtgtcaggtaagttgatagttgatgcacccgcatcaatagcactttcaacgatacggcataaatcccaatgcggtgtgcggcctgcatcttcacacgaaaactcaacgtcatccgtgtagttacgcgcaagtttaatcgacttaacagccatcgctgttgcatcgtctaagctcatacgtaatttgtgctcaaggtgtaatgggctggttgcaataaaagtatggatacggccttgctctgccgggcgaagtgcttcaccacaggcttctatgtcttttgctacagcgcgagctaagccacaaataattggccctttcacttcagtcgcaattcgctgtactgagcgaaaatccgccgggcttgataccggaaaacctacttccattacatccacatttaagcggctaatggtatgcgcaagttgaattttgtcgtcttcggttaggcttgcttttaatgcttgctcaccatcacgtaacgttgtgtcaaaaatccaaaccttatctttcataaaactgtcctcgttcccaatgacccattagcgagataaaaaaaaccccgcgtttgcggggttttttaatgttctacaaatgcaaatacactaagccccgctcactgatttaagcagtaagaggtttagttttaatgtaattaaacgaatcatttgcattgtatttatctaaatgtgtgttcagtgagctgtatttttaacattcaaaaaaccagcttgcaagcataattttttcaaaaatcacatttttatttacacaaaatagaaaaaacaaacctaaagaatcattaaaaacgaatataatatccaaaactaatgagaacggcgtttaaatattcgttcagcaatcactgtattgtttagattaacttttaagattgatggttatcacgtacatacaaagttgcaccgcgagcaatataacgtaattgccagatcagtcgctctactaattcttcacgttgctgaccttcgatatctaacgcttcagcacctgcattaaaaacgagcgtaaccatggcttctgcttgaatataagcatgagtcgcatcgcaaggagtttcgctttcaagataatgggcaagctctaaaataaagtgtttaatttcgcgtgctactgcagcacgaaatgcttttgaagtgccagagcgctcacgtaataacagcctaaattggttacttgaattatctataaactccataaaagtcactatggaagtacttataacgctgccaccactggcgattcggcgacgagcttgacgcattagttgacgtaacgttaatccggcttcatcaaccatggttaaaccaagttcattcatatctttaaagtggcgataaaaagaggttggcgctatccctgcttcacgggcaacttcacgtaagcttaggtttgaaaaactatgatctgcacttagttgattaaatgcagcttcaattagtgcttgtcgtgttttttgtttctgttgtgccctaacacccgacatggaaactcccagcgtgaacttttaatgattttcggttaatgagacagtctaatacttgacgcgaagagtttgaaatactattttagcgtacagttgtacgccgagattaatttagatgaaaaaaccacctattatttggactaacgtcctcttttttagcctgacatttttagccgcgatcactcttgtaccttggtatggtctgacttacggttttaccagtacacactggatcgcatttgttggctgtatgttttatgcaggactatcgattactgcaggttatcaccgcttatgggcgcacaaagcatatgatgttcacccagttattgaagtgatttttgcctttggtggcgcatttgcattacaaaacagtgcgttgcactggagtagcgatcaccgtattcaccatggtcaagttgatgatccaatcaaagacccttacgctgcaacaaatggcttttggtatagccacattggttggatgctgcgcgattatcaaggtgaagaatacagtaactacaacaactgccgtgacttacaaaaaaataaagtagtaatgtggcaacatcgtcattatatgaaattagttattgcgactaattttggtattcctttattgctaggtttaatgcttggcgatgtatggggtatgttattactagccggtttactgcgtttagtattaagccagcactttacttttttcattaactcagttgcgcatatttggggttctcgcccttacaccgaaaaaaacacggcacgtgataatggctttttagcattattcacctacggtgaaggctaccataacttccaccatatttttgctagtgactatcgcaatggcattaagtggtatcactatgatcctacgaagtggatgatccgctcattagcagcgctaggcctggcttcaaaactaaaacgcacccctgtggaacgtattgaaaaagccaaagccgaaaccttaatgaataaaacccaagttcgccttgcaaaattgcctttagcgcaagataagcttacattactacaatctgaatatgatttattgctgaagaagttgcagcatttttgtgccttgcaaaaacgcgtgttagacatcaagaaaagcaaaatgatgaaacaatgcgaaaaatcagcattaatgacacaatatcacgagcttgaagccgcttgggaaaaccaaaagcaggcttggcttgcactaaatgcgaggttgttaaaagcctcttttagttaacataggagcggctgtggccaaacaacaagtaaagcaaaaagatactccatcttatcaatatgatgcgatcatcataggcacaggtcctggcggtgaaggtaccgccatgaacctgtctaaaagtaacaagaaagtggctgttattgagcgtcaagaagcggtcggtggcggctgtgtgcactggggtactatcccgtctaaagcattacgtcattcagtaagccgttacattgaatacaaagcaaacccgctatttaatatcagcgagcgtcctaaccgcttaactttccctgatattttgcaccatgcaagtaacgtcatctcaaagcaatctaatttacgtagcagcttttatgagcgtaaccgcattcatatgtatcaaggcgatgctgagtttattgataaacacaccattaaggtgactcacttagacggttcatttgaaactatcaccgcacaaacaatcgttattgctactggctcgcgcccttaccgtccacctggtgtagactttgcccacccacgcatttacgacagcgatacaattttaggccttgagcatgaccctcatcgcgtactaatttatggtgcaggtgtaattggttgtgagtacgcctctatctttaaaggtttaggtgcaaaagttgatctagtgaatacccgcgaccgcctgcttgcctttatggatgcggaaatctcagatgctctgagctatcacttttggaatagcggcattgttattcgtcataacgaagagtttgatagagtagaaacccgtgatgattgtgtggtgatgcacttaaaatcaggcaagcgagtaaaagctgactgtattttatttgctaatggtcgtactggtaatacagatacgttaaaccttgaggctgtgggcctaaaagcggatggtcgtggccagcttagagtaaatgaaacataccaaacagaagtcgataatatttatgctgtaggtgatgtaattggttacccaagccttgcaagtgcagcatttgaccaaggccgtattgctgccgatgcgattgcatgtggtaattgcgatgagaagctgatcattgatattccagcgggtatttatacaattcctgaaatgagctcagtgggtaaaacagagcaagagctaactgcagcgaaaatcccttatgaggtaggccgtgctcaatttaagcatttagcgcgtgcgcaaatagctggtaccgaggtaggtagcttaaagattctattccatgttgataccaaagaagttcttggtgtgcattgcttcggtgagcgtgcctctgaaatcgttcacatcggccaagcaattatggaacaaaagaacggcggcaataacattgattactttgtaaataccacgttcaactacccgaccatggccgaagcctatcgcgtagccgcattaaatggtttaaatcgtttgtttaaataaataaaaaagcccgcttaatgcgggcttttttacgattagctgttgcttatttgtggtatttaccgctgaactcatgaacggcgttaataaatacaccagcgttttctggatcaacatctggtgtaataccatgacctagattaaatacatggccagagcctgtaccaaagtcttctaggatagtggcaacttcttggcgaatacgctcaggcgtgccatgcagcattgctgggtccatgttgccttgcagcgctactttatcgccaacacgacgttttgcatcaccgatgttaatagtccagtccagacctactgcatcacagcctgttgctgcaattgcttcaatccactgaccaccatttttagtaaataacgtcactggcactttacgaccatcgtgttcgcgaattaagccatcaacaatcttgtgcatgtactgtaatgaaaactcattgtagtcacgtgggcttaatacaccgccccatgagtcaaataccattaacgattgcgcgcccgctttaacttgcgcgtttaaatagtcaatgactgagtcagctaatttatcaagtagtaagtgcagtgtttgtggctcagcaaaggccatttttttgattttaccgaatgttttgctgctaccaccttcaaccatgtaagtggcaagtgtccaaggtgaaccagagaaaccaattagcggtacttcaccttttaattcgcgacgaatggtacttaccgcattcatcacataaccaagctcatcagttggatcgatatttgggatttttttaacatctgctaatgaagaaatcggacgttcaaatttcggaccttcacctgtttcaaagtaaagacctaagcccatagcatcaggaatagttaaaatatcactgaatagaatagcagcatcaagcggataacgacgtaatggctgtaacgttacttcacaagcaagttcagcatttttacataaactcataaagtcacctgcttgggcacgtgtagcgcggtactcaggtaaataacggccagcttggcgcatcatccataccggtgtgacatcaacaggttgcttttgtagtgcacgtaaataacgatcgttttttaattcgctcatgcgtatagaatcctagaactgaatgaaattgtgcagattgtaccaccatattacacgtctcactatggatagataatcatggctagatatagatcatgttttttaggtcagcctaagcctatagtgcgttttttgagcgaaaacaaaataattttaaaacttttcattaataaatttgcaacataccaaaaagcttggtataacttatcccgcgttaacaataacaacaataaaaatcttataacaagaagaacaataatcttcccataacaataagaacgcttgttttaacaagtcatagaaaaagaattaaaccacctttataggtggttttttctttttagaatcagcaaattacccccttctcccattagataagtaatgcaaaattaacactagtagttttgatttatttcccatacactgctgttagagcataaaagctagcctcaggtgtcgttgcgttgcaatttcattgtaaaaaattacgtgcttaggatggcttttacaatctgttgcaattagacactaagaatttagttgatctttgtgtcatatttcctttttatatatacaaaggaaaacctactcagcgaggagatgaaatatgctgacgcgtttggaaaaagctcaacaaaaatggggtggcagtcactctgtaatagacaaatggctaacagagcgccaagaattattggtgttattctgtcgtattgctggcttttcaccgtacgagaagaaagatcacgccctaccggatcaactgcaaattcagaatttttgccaaattctaatggattatctttctgctggtcactttgaaatatatgacgacatcgcaaaagcctgcaaagagaaaggccctgaaagccaaaacctagcaaatgctctttacccgcgtatttcagaaacaactgacgtcgctctcgactttaatgataaatatgctgaagttgacaaagatgacttacttgatgagtttgataaagacttgtctacattaggtgaggcacttgagttacgctttgaattagaagatgagttaatcgataacctttattcgaatcatacaagctaatttgcgatgacagcagagaagcatttctctgctgaaagtactagtaatttgcacccaaccataaataccttgcgccatataagtataaaaacggcttgattggtggtaaaacttcatcctccaaaagaatcaactattccatttcgtaacaaaaatttgaaataattctttcaatgcgatactcatattataaaaaacatgaggttcgctatgaacaaacggtcatttttaaagtcactttcaatccttgccgctggcgcaagtctaacatccgctcccttaatggctgctcagaatagcagtacccaaacattaattaagccaaaagctcttcctaaaggcggcacaattggcatatgtagcccctctgccgccactgctgcgcacgctgatattttattagcacaaggcgttatagaggcactgggttacaaagctaagcttgcaccaaacattttggcaagacgagggcatttagcaggcactgatgcgatgcgagccggtgatttaaacagtttatttagtgataacgatgttgatgctattttgtgtttacgcggcggctcaggggctgcccgtattttacctttactcgactacgcaatgatccgtaacaacccaaaacctctaatgggctattcggatattacagcattgcataacgcgttactctctaaagcagggctgatcagctttcatggtcccaatgcatcgagtgattggaatccgtttcatgtagcgcaatttaaagacatgttcgaagcccgtaaactaatgcattttcaaaatttgccgaaagccgatgatgagctcgttaacacacaatacctgacccaaacaattacttcaggaaaggctacaggacagttaattggaggtaatttaacggtactgaccgcacttgcgggatcaagctatttacccgattttgacggcgcaattttatttttagaagatatcgacgaagcaccctatcgaattgacagaatgatgagcacactaaaacttatgggcgcacttgataagattgcaggctttgtatttggcgattgtaatgactgtaggccaggtcgtggttatggttcattaaccctagatgatatttttgcagactatattaaaccgctggggattcctgcttatcgtggggctatgattggccatattaagcgccaatttatcttgcctgttggcactttggttgagcttgatgcagatggtggcacattaaaaatgacagaagcggcatttagttaataccaattcgcgcataaaaaagggccattcggcccttttttattgagttaaatattactcagctggtactgctttttcatcgctttggatttcaagtaattctacttcgaaaacaagcgttgagttagctgggatcttaccaagatcacgctcaccgtatgcaagttcagatggaatagtgaacttgtacttagagccaactggcattaattgtaaaccttcagtccaacctgggatcacacggttaagtgggaacgtagttggttcattacgtgagtaagagctatcaaactcagtgccgtctagtaaagtacctttgtagtgtactttaacaacgtcagttgctactggcttttcaccttcaccttgtgtgatcacttcgtactgtaggccagactcagttactgtaacgccttctttcttcgcgttttcagctaagaatttttcgccttcagctttgctcttttcagcttctactttcgctttttcttgttgtttagtgcgaatgctttgatcaagcgcagttaacacttcacgaattttttcatcatcaagcttagcattacctgcaagtgcgtcttcaaagccgcgcttaagtagcgcttcatcaagctcaacacctaattctttcttttctgctaggtcttggtttaagaagttaccaacagatgcaccaataccgtatgcttgttgttgtgcttcagtctctagtttaacctcagcttgctgctctttttttgcttcctgattacaagctgtaagcgctaaaactgacgctgcaatcaatgacaatttaatcgtctttctcattttatatctccgacacactttgcagttgtcaattattgtattattactagttaaagagttacgacctacgtggtaggctgcttgtctaataactaaacgtcatgcaaatgcattagcaagtgattagactaacaacctaggccttccatgagacctagtctaacctctcaatcactaagagttaaggggaaatacccgtaatatgtcgatatttcgtacttttttgtatctactgagccttggcttggttgttgcttgctcagaacaacatgagcaatctacagcacgctacgagcatgctgcacaaggagcatttgcctctgcactttcgcacgatggtaaatacagcttaatctcatcaatacaccatggggtcgcgctgtgggataatcaacagcacgtattaaaataccaatggttccaacagcaaaaccaagatagccttgttcataccgtggcaatttcctatgacaacagccatgctgttaccgcagaaaaatcaacctttgctgtatgggacatcgccacaggtgaaaactcaggttattacaaaatacacgcctcaacaatcagagatatcgcaattagtaatcaaggccagagtgttttatatggtcgcgccgatggtgttgttgtatacctgaacttagagaccggacgtcgtatagagttccttggtcaccaagaaaaagtaaatgttgttgatttatcccctaacggccattttgccattagtggctctaatgactatgtggcctacttttgggatacccggacagggcaagtcattcaccgctttaatcacccgactcgcgtcacgcaagttgcccttgacccacaaggtcgttatgcatttacagcagacagtatgaagcaagcaaatgtatggcaactgactacaggtgatcttgttagcaaactgcagtatattgcgcgtcagaaaatttttaccgccgctcgctttaatgaagaaggcagtttaattgcaactgggtcaccaaatagactcgtcgaattatggcaactaaactcaggtaaaaagttacaaacgtggcaggtcattcctcgtgaaggaagtcgcccaaaatcggccgtggtgttagatgttgcgtttactgataacagccaagcgttattaaccgaaagctccagcggatttgctgaaagttttaatttaagagaatcgaatgaacacaattgaaaatcgtctaatggaacttgaagcgaaagtcgcttttcaagatgaaacaattgaaatattgaatgatgagcttaaagcacaccaacagcagctggcaaaaatgaaacgccagactgagttgctggcagaaaaaatcaaagaagcacaacaaccttcattgatgtcgcagatgcaagagccgcctccgccacactattaatgtgagggttacaagccgggtgttattcgcccggcttaaatacaccaattacttgctcaaactggcgggttgacgcttgcaccgctttctctggttgcgtcattttatggccacactgtacgcattctactttttcaacatcgtgctctttgtatagcatcatagtatccatagctttacactcagggcatgatgcaccggcgataaagcgtttcttttgtctcataaatgatctcccgtggcatgtaggcggctattttagcctaataattctctgtttgatacgattgcgaagcctaatgtgatccgtgttatgataagcaaaatttaatctatgcagtgcaagtaaactttcatgatccaaatttcagacatcgagctactacgaggtggcaacgccttattaaaaggtgcctctgcaaccttattcccagaacataaggttggccttgtgggcgctaatggttgtggtaaatcaaccttgttcgcgctattaaagtctgagttacagcttgatgctggtgaatgccaaataccaaaagattggtcaatagcctctgttaaacaagaaacaccagcccttgaaataagcgccatagattacgtattacaaggtcaccctgagtactacacattaagaatcgcactccgtgaagccgagcaaaataacgatggtgatgcgcaagcaaaagcacatattggtctagaacatattcaaggctacagcattgaagcaaaagcgggtgaactattacacggtttaggttttagtaatgagcaaatagacaacccggtgagtgccttttcaggtggttggcgtatgcgtttaaacttagcacaagcacttattcgtgatgccgatttattactgctggatgagccaaccaaccacttagatcttgatgctgtttattggctagaacgattcttacgtgcctacacaggtactctagtactgatttctcatgaccgcgaattcttagatgccgtcgttgaccaaatttggcacatagacgcacaaaaaataaatgtttataaaggcaattactcgcaattcgaacgccaaaaagcagagcgtttattacaacagcaagccatgttcgaaaagcagcaagaacaaattgctcatctagaaaagtttattacgcgttttaaagcaaaagccagtaaggctaagcaggcacaaagccgagtaaaagccttagaacgcatggaaaagttggccccagcccatgctgattcaccctttgattttgagtttgctgagcctacagccctgccaaatccattaatgacgctcgaccaagctaaagctggctacggcgataccactattttgcatagcattaagctaaacctagttccgggtagccgtattgcgctgcttggccgaaatggtgcaggtaaatcgacattaatcaaattattagctggcgaattacaaccacaagctggagaagtatttcagcatcagggcttaaacattggttactttgcgcagcatcagctggagtcactcgatctaaaagctagcgcagtaacacatttacaacgcttaaatccgcaggcaacagagcagtcattacgcgactttttaggtggttttgcattctttggcgataaagcgcttgagccagttgcaccgttttctggcggtgaaaaggcccgcttagtgttagccatgttagtgtatcaaaagccaaatctactgttactcgatgagccaactaaccacctagatttagaaatgcgccatgccctagtgatggcgctacaaggttttgaaggtgcaatggttactgtatcgcatgaccgtcatatgttaaaaaataccgctgatgagtattatctcgttgataacggcgaagtaacgcaatttggttatgaccttgatgcctattaccaatggctactcaacgccaacaaagaagcagctaaaagcaacgaagacaatgcccctaaagcccattcaagcgttaaccgcaaagagcaaaaacgcttagaagccgaattcagaaaatcagtgcagccgttgaaaaagcaaatcgacaagcttgaaaagcaacttgataagtactcaacagagcttggggaaatcgaaagcgcgcttgccgataatgacttatacagtgatgagaataaagccaagctaaccgagctactcactaagcaagcaggcttaactccaaagcttaatgacgttgaggaagagctgctcatggcacttgaagagcttgaagaaaaagagcaggcctttgccgatgaaaccgcttaatagcgaggaattttggcagtttgcatgccatctttatagcgaagatggcatgcaagcaaagctattaggctatcaaaaccagcaaggtaaaaatgttaacctttgcctgctgctctattatcttgattctttagagctggctgtaacactctctcaactgagtgaacttgagtcgtgcattgccgagtttgatcaacaggctttaaagcccctacgagccacacgcgcctatcttaaaaccattcaaaccgaaatttcagactaccccaccattcgaaaagagctacttagcgcagaattaaaactcgaaaaacaacagcaacaattactaatagacacagcgaataccatgatattcactcagcacacaaatactaaaaatataaggctttatgttggtagcgagctagcgagttagctggggtaaagtttaaagagtcgtgataaagcctaattgtaaggacggttctaattcggcacttctatttatgttgggtttcgctgcgctcaaaccaacctaccttaataaacttgatccaaatcaactattaaatcgccttatttcacatcaggaaaaatgcttgatctggatcatgtcagggtatgcaaagccagcctatgattaacccatagacattaggaggcacaaccatgaacgttttctttagagatttttttagcgacccagttttatttatgtcattcggcatattggcagttgttatcgttttatgccttttctatgttggttactttattaaaaaagttcacgacgcagaagttcctaagtaagaattaagcacgacgcacaaagcccctatccaatttattgtttaggggctttttattttcagcagataagcaaaatctgctaaagtgttctaaaaatgcaaaaacttgctacaatagcggcctgtcttgtctttaaagtgttagctatgttacctgagtttaagcctgcgtggtggatgcgcaatcgccatttacaaaccataatgccgcgcttctttcgcccttttcataatactcgctacgacttatcaacaattaacacgcctgatggtgactttttagaactggcatgggcaacgcctcacaacgaacaggctcctttagccattgtattgcatggccttgagggcaatattaatagtttttatgccaaaggcatgatgaaaaaactcaagcagcaaggctttgctgtggtgttaatgcattttcgaaactgctcacgcgaagcaaaccgtttagctcgcgcttatcatagtggtgagaccgaagatttacgcttttttatcaactatctgaaaagtaaatttccaaaacgtcctttatttgctgtcggcttttcactgggcggtaatgtactggcaaagtatttaggtgagcaaggtagtaaatcaaatttaaatggcgctgcggttgtatctgcaccatttgatttgtcatcctcttgccaagtgatccgcaaaagcttaggtaaaatttatcaaaagtatttgctcgatcgtatgaaaaaatcaatgcatagaaagctgccacaaatcgaacagcaaattagcctaacaccaaaaaagctgatggcaattgatgatttatggcaattcgacaacatgctgactgcacctctgcatggctttgccggtgctgaagattattatcagcaagcaagtgccaaaccgtttttaaaagcgattacaacgcctacactcattgtacacgccaaagatgacccaatgctgtcaattaaagctgtaccaaatagcactgatgtaagcgagtatgttacgctgcgtatctccgaaaaaggtggccatgttggttttattagtggcaataacccgtttaaacctatttactggcttgagcgtgttgtacctgactattttcaacagttagtaacaaaagagcagttatgatcattccacacgaacgcctcgataaagaaaccctttacaatttaatcgaaagctatgtattgcgtgaaggcactgattacggtgaacaagagttcagcattgaaagtaaggtagcccaagttcagcagcaattaaaatcgggagaagccatggtgttcttttctgagttacatgagtctgtgacaattatttcaaaagcagagttcatcgccctacaagctgatcccgagtaccaagcgtcattcaacgactaaacttgtaacttttatcgcaacccttcacaatggctttttaacttaaagagccattaaaatgaaaaaactaagctccttatttgccgctgtttcgcttgccttaattgggcaagcccatgccggggaagtaacagcctcagcaaaagctatcaagcttactaaagagactattttaattgatacccatatcgacgttccgtaccgcattcatgataaatgggcagatgttactaaagcgactagcgatggcgattttgattatcctcgtgccgtaaaaggtggcttaaatgcgccttttatgtcgatttatattcctgcaaatcttgaatttgaaggcaaaggtaagagctaccagcttgcaaatcagttaatcgacagtatggaagccgttgtacagcgtgcaccagaaaagtttgcaattgccgactcaacagacgatgtaaaagcacaatttcagcaaggcaaaatgtctattgcaatgggtatggaaaacggctcaccgattgaaggcgagattaaaaaccttaagcatttttatgaccgtggcattcgttacatcacgctagctcattctcaaagcaaccatatttctgactcttcatatgaccttcgccgtaaatggaaaggccttagtccatttggtaaagagctagttaaagaaatgaacaatattggcatgcttgtcgacgtttcgcatatttctgatgacgcgttttatcaagtaatggaaatctcaaaagtacctgtgattgcttcgcactcatcactgcgtaaatatacaccgggctttgagcgtaatatgaatgacgacatgttattagccctaaaaaagaatggcggcgttattcaaataaactttggctcaagctttgttacatcgcaagccggctcttggtataaccagctcaaagcagcgaaagcagataagaaaaaagaaggcactaagctaagcaaagattttgatgcagcttatcgcgcaaaaaatccatttccatttgcaagcctagaacaagtacttgatcacattgaccatgtagttgaactaattggcattgattatgttggtattggttctgactacgatggcgtaggggattcattacctgtaggcctaaaagacgtatcgagctacccgaacctagtacaagggcttatggatcgcggttacagtgatgcagatattaaaaagattttaagtggcaatatgcttcgtgtttggaagcaagctgagcaatacgcagcgaatcactaattcttaccgccaataagcacttatttttatgtgcttattggcgactacaacttctactttatagctattggtatttttattggaaaaggttaaattaccttttttaggaaggatttaactatgctatttagtaaaggaaacatatcactttgcttagctggagcagctcttgtaatctcctgctacggcgccttttttcaaaccaagcagccacaaataaatcagttagcgaccgactcagagcaacaatacaacttagccagcagtgattttgatgctgttgagcatgatgatgggcaaaccttagcaaggttgaataaaagtattatttcactaaaaaaacaagttgccgagctcaggcaaggtagcgcatcgcaccaaactatcaccccagatctaaaagaatctgtactcgcaatcctcgcagagaaagagcaacaagcgcttgaaaaagccgagcagaataacccgatttatggtttttataatagcctacctgatgactacgaattaagattaaaatcggaacccgattatgctgacagtctaaacaaacaactacgtgagcaaattattgatccataccagtcagacaaagaccgcctcaaagccatggctcaattacaaatgaatatgtttatgcttggcaagcaaacgctgccagaatatgactacgatattgctaatagcatgctaaatatcgcggccaatagccaagataataaactgcgcgttcaagcgattgagttagtttcacaatctcctattttagactcaagattaactcaacaatatacacaaatactcgaacgcgatgacaacgaatatatacgccgcttagcagcacaagggatactatcgcaatatttcatagcaagaaatgagcaagctgataatagccaacaactggcgcagcaaattttaactatttataggcaccctataaacgagagtgtaaaaagcattattgatgaaatgattggtgacccgaatatgctcgatgagttaaagaaatcagcaggcgaataaaggcggcagattaacctttcactctatacttcacaaagcttccagctttttcacccataaaaaaacccgagactaagctcgggtttttctcaatgcttaatgcatcactatagttgattactcaacgatagatgcaacaacaccagcaccaactgtacggcctccggctcatcgcagagctctttgccttcaagcggcgggagtttcactcccgaacaccccgctttcagccttcacggatagcgaagcgtaaaccttcgtccattgggagtttgaaggcggcagattaacctttcactctatacttcacaaagcttccagctttttcacccataaaaaaacccgagactaagctcgggtttttctcaatgcttaatgcatcactatagttgattactcaacgatagatgcaacaacaccagcaccaactgtacggccaccttcacggatagcgaagcgtaaaccttcgtccatcgcgattgggcagattaactctacagtcatcttgatgttgtcaccaggcattaccatttctacgccttctggtaactgtacgtcacctgttacgtcagttgtacggaagtagaactgtggacggtaacctttgaagaaaggagtgtgacgaccaccttcatctttagaaagtacgtatacttctgaagtgaatttagtgtgtggcttgattgaaccaggcttacaaagtacttgaccacgctcaacgtcttcacgcttagtaccacgtagtagtgcaccgatgttctcacccgcacgaccttcgtctagaagcttacggaacatctcaacacctgtacaagttgtcttcgtagtttctttgatacctacgatttcaacttcgtcattcacgttgatgataccagcttcaacacggccagttacaacagtaccacgaccttggattgagaatacgtcttcgataggcatgatgaatggcttatcgatgtcacgctctggctctgggatgtatgaatctagcgcgtctgctagttcaacaatcttgtcttcccactctttctcgccttctaacgctttaagcgcagaaccttggattagtggtaagtcatcacctgggaagtcgtactcagaaagaagttcacgaacttccatctcaactagctcaagtagctcttcgtcgtcaaccatgtcacatttgttcatgaatacgatgatgtaaggtacaccaacctgacgagaaagtaggatgtgctcacgagtttgtggcataggaccgtcagtcgcagcaactactaggattgcgccgtccatttgagcagcaccagtgatcatgtttttaacataatcggcgtgtcctggacagtctacgtgtgcgtagtgacgagttggagtatcgtactcaacgtgtgaagttgagattgtgataccacgctcacgctcttctggagcgttatcgattgatgcgaagtctttagctacaccaccgtatacttttgcaagtacgttagtgattgctgctgttagagttgttttaccgtggtcaacgtggccgattgtaccaacgtttacgtgcggttttacgcgttcaaacttttcttttgccatgacggaacctatcagttttgtgtatctagattacatatgaaaataatccaccgagggtagattaatttaattttttcaaatttcaaatagttttttctgacagataaaggaagaaattaagatgagttctcgatactggtgctgataggcagatttgaactgccgacctcacccttaccaagggtgcgctctaccaactgagctatatcagcaacaccagaagtctggagcgggcagcgggaatcgaacccgcatcatcagcttggaaggctgaggtaatagccattatacgatgcccgcataggaacctgttcttaaactacctctaaccgtcaagaataaagtggtggagggagctggattcgaaccagcgaaggctgagccgtcagatttacagtctgatccctttggccgctcgggaacccctccacgaaaattctttactaagtcacttccggtaaaaggaaagtggtgccgactatccgagttgaacggatgacctactgattacaagtcagttgctctaccaactgagctaagtcggcactgctttagtacggggcgagattctaaggtaaggtttattgtgatgcaacaataaaatcaaaaaaaatgtgattttatgtgttaaacgctcactattcaggcaaatataggcttttttactgttttagtgttaattctaaccagtaattcagtcctttaaaaacaagctgactgtcaaactcactctcagcgaactgttcggccaacaactttccatagccaccagcgaataataaacggctattttcgttattaagatgacgcttagcttgctcaattgctcctacagtcgcaacaagtgcaccgttttttaaaccattaggggtatttcggcctaactctgctgcaaatggagtttgcccatcatcgaacactttttgcgtattttgcgttagtgaggttgtcattaaatcaagcccaggcaaaatccacccgccaaggtgttctccttcgctgtttaatacatcaatcgttgttgcggtgccagcatcgaccacaatacagtgttgctttggcagctccacatatgcagcaattagtgcaagccaacgatcaatacctaaattggtaaagtgctcgtaggcacattttaaattctcaagtttagcgcttacttttgcctcgtacacggtaactttatgttgctcggctaacttaatgagaggagcaagcaactcggtgctgcctacacaagcaaacaccatgtcattaatttgcggccaaggcagcgcattcagttcacacggtttgtaacagccctgattatataaaacagctttaatagcagtattacctacatcaactaacagtctcatttatctgccttacgcaatgaaatctcaccaccatagtaactctttacctctccgtcttggcgaatgcggataccaccttggctatcaatcccttcacaaattcctcgccaactacgatgcccagtatttagctcgacacactctttagcaaatgcatttaagctattccattgtatgtacatctcgtttagccctgactgctggtactgcgctaatcgctgttctaaacaaatacacaaataagcagcgagtttattcttatctaactgttgaacatgctggctcaggtcggtccaggcttggtcaatgtgttggctgacactttcgggcatatgtaggtttatgccaataccaatcactaattgacagggcccttgtggttgcccatcaagttcaacgagaacacccgccagtttttctctgtttatataaatatcgtttggccacttaagctcaacatcaatttgatacaaagcttttaaggcatcatatacagctagccctactgcaatcgacactcccatcgccgcctgtaagccatcatccaagcgccagaagtaactaaagtataaattagcgccaaatggtgattgccatactcggccgcgacggccttttcctgcttgttgcatttccgcaaccagtacagtgccagatgttaacggaacatcactttgtagacggcgcattaattcactgttggttgaatcaataattggctgcacctcaacgttggctgtgttaccacctagttttttatactgctcagtaatcgcttgttgatttagaaaccctgcattattgttcaggcaataccctttacccgttactttaaagatatctaggcccatttcctgcaaagaatgaatatgtttaccaacagcagcacggctaatacctaattgctctcctaattgctggccagaaacaaaaccaccttgattgagcgcttgcaaaatagctaatttattaccatctggcgctttcatgatgaagctcccaattcaatgtgacactcacgatcggcatcaatcagtcgcacctcgtgttgtagcgcaattttgtaattttgccagacttgttgctgaacatgtttcaccatggcaattaaatcatctccagtgctattgccgtgattcacgagcactaacgcttgctgctgatgaacttcaattcctgcaacttgatagccttttaacccagcatgttcaatcaaccaccctgcggcaaccttatgatgttcagcatcaacatagtaatgaggtagctcagggtactgttttagaagtaacgcaagttgttcattagagatcacagggtttttaaaaaaacttcccgcattagcaagttcacttgggtttggtagtttgctgtttctagttgtgatgatttgttcaaacacctgctgtggcgaaggagttgtaagctgttgcaatggcccataactaagcactggttgccactttttagggagcagtaacccgacttgagtgatcactgctttatttttaagtgcatgtttaaagatagagtcacgatagccaaattggcattcgtcttttgttaaacagtttatcgttttggtagcaatatcaaagtactcaacataactaacaaacttttcgagctccacaccataagcaccaatattttgcactggcgcagcaccaacggtaccggggattaaagcaaggttttcaagccctggcatgtcattggcaatggtcatagcgactaattgatgccagttttctccggccgctatatgcaataaaaagccatcactttgctgctctatatttatgcccttcgtgttcatgtgaacgacagaaccttggtagtcagataaaaacaccgtattactgccttcacctaaaatacaaaagggagacgaaaagtctgtgcttaaaagctgattcacttcatcaatttgataaaaatgctggcattggcttggcaaagaaaaggtatgaaaagattgcagggactgagccacaaaacgcctcaaaggttaccggtaactaatcgcattagtgtaacctatcgtcgcaaaatacgcattagattgtaaaaatcactcaacccactgcactaatcatgttataaaacgggctctttttcatttgtgttccagggttattatgaagtttaaaccattacttttaagtcttgctatggccggtgcttgctctcaagcaactgcagatgcaatcagccagcacacttacgcaaacttagatgacgtaacaaccactcacctactactagatttagatgttgattttgatgacaaacaactagagggttttgttgagcatacgctagattggcacaatgcgaacagcaaaacacttgttcttgatacgcgcgatttagatatcgacaaagtaatgtatcaagataaaaaaggcagctggcacaaagctgacttcacccttgctgcacgtgatgacgtgaagggctcaaaattaacaattaaatttaaaagccaagcggttaaagcacgtatctactacaacagccgcccagaagcttcaggtttacagtggttaacaccagagcaaacagccagtaagtcacacccatttatgtacagccaatcacaagcaattcatgctcgtagttggatccctgtacaagatacgcctgcaatgcgcgtaacttactctgcacgtatccacactcctaaagacattcgtgcagttatgagtgctgacaataaagatgcgctttataaagacggcgactacttattcgatatgccacaacccatttcgccatacttaatcgcaattggtgcgggtaatttagaatttaaagccatgtctaagcaaaccggtatttttgctgagccaacaattttagatgcgtcggttgcggagtttaacgacacacaagcgatgatcgacaaaactaacgcaatgtatggcgaatacgcatggggtcgttacgacttattaatgctgccaccaagcttcccattcggtggcatggaaaacccacgcttgtcattcatcacaccaacggttgttgctggtgataaaagcttagtaaacctaattgctcacgagcttgctcactcttggtctggtaacttagttaccaatgcaacgtgggaagatttatggctaaacgaaggcttcacgtcttacgttgaaaaccgcatcatggaagaagtgtttggccgtgaccgtgcagtgatggaacaagcacttgatgcagcaggcttacgtgcattacttaaaacgctaccagcaccagatacgcgccttaacttaaaactaaatggccgcgatcctgatgatgcatttagctcagtgccttacactaaaggtcaacttttcttaatctatctagaaaacaaatatggtcgtgacaagtttgacccatttgtaaaaggttactttgatcaatttgcgtttaagtctcttacaaccgctcaatttgttacttacttaaaagcaaacctgatcgacaaatacccaggcgtggtcagcatggataaagttaatgagtggatttttgagccaggtttgccaagtgatgcaccaaatccaacctctgatgctttcgataaagttgatgctgtaaccaaaacatggttaaacggtgagattagcgcagctcaattaccaacagcagattggtctgttcatgagtggctacactttttaaataatctgcctcgcgatttaagcattgaaaaaatgactgagcttgataagcaattcaacttaacacagtcaactaatgctgagcgcgctttcgcatggtttatgctagcggtaggtaatggttatcaaccaatttaccctgcacttgataagcacctctctggcatcggtcgccgtaaattaattgtgccactatataaagcacttattaagaacggtaaaaaagactgggcgcatgatgtgtacttaaaagcacgtccgggttaccaccctcttgcacaaggtacagttgacgacttattcgcaaaataagtcactacactcaaaaaaggcgctgatttcagcgccttttttaataattagatttagttgcttaccttttgtaagaatgcccgacgctcttcagggctcgcttgttgccaccaaaactctagcattgccgctgcatttggcatattttttaatccagcctgcccacctggtacttttgcaggtaaggtaactggcaccgctgtcgcaggcttactacttgaacttgcaacaggcgctgtcgcaacagcttgcgctgacgttgactgtgcacgataactaacaattgataacggcatcgcaagctcactgcctttcgcttttaggctcacttgaggtgactcagcaaacacctgcgctgctacagcattactggcgcgattaaatacaacatcatagtctttgccattttcaaccgtcacttcaacccaaaaaggctctgactctacaacctgatggtcgtcataaccttgctcatatagatctgtgtatttcattttcagctgataggtaccaggggcaagctcaacatcatcaacacggctaaaaaatgattgctcaataaggcgatctcccacttgtaacggtacaagctcttctggaaagtgaatagtctcggctacactgctaacactattcaatagcattaacacactactcagtaatactaacttacgcatgttcactccttggttgttcaacttgtggcagtttcagtttgacactgcaaataaagtttgtcattagtgggcggtcatttaaccacatttataagagagctaagtatgagccaagagactatttttacaaagattattaatcgcgagatccctgccgatattgtctatgaagacgagttatcactggcttttaaagacattaatccacaagccccctttcatgtattgatcattcccaaaacaccaattgcgactgttaatgacgttacagaagaaaatgcccacttggttggtcacttgtatgtcgttgctgcaaaactagctaagcaatttggttttagtgaggatggctttcgtgttgtgatgaattgtaacgaacatggcgggcaaacggtgtaccatatacacctacacatgttagcgggcaaaccaatgggttggcctccttaccaagataagatgaaagaaagcatctagcactttaatatgtaaataactgtaaaaagtagtacaaacatattaatttgagctatactatatatatatcagttagttaacacgttgcattaagttaactaactgtattatttgacacaaaatagacacaaactgcacttttcctgcacaactctcagaaatttctaatacgaaaggggtggattgcgtggtaggatgaaactgtcaactttattcaagagtgtatatatatgagtagttcagcctttttattattagatccagaaccgattaacacaattggtgttaatgtattagaaccacttttaaaaacacaggggctagacgtcacatctggtactgatatttctgaagtacctgaaggcacacgcttgttattcattgaaacatcaagcactgatccatggggtaagcttaaagagcaactcgttcatctgcgcatgaaatgcgatatcgtattattcaatttagatgaaaaccctgaattagctaaccgtgctctattaagtggtatccgtggtgttttttacacaacagacaatgctgatgtgttaatgaaaggcattcgtttgttgctggaagatcaattatggtatcgccgcgaaatcatgtgtaatgcattaaatcgcatgctgcagtttaataaagatgccttacataaactgacagatggcgacatcgagccggttaaacttactaaacgtgaaaaagcaattatttcactaatgagtaaaggttcgaaaaataaagagattgctgaagacttaagcattagcccacacacagtaaaaactcacttgtacagtgcattcagaaaaaccaaatgccgtaaccgtatcgagttattgtcatgggcacagcaaaatattcctgacgagatccgttaaatccaatacgcttcgtcaagtattattgccaattgctacaatacaccctactaagttaaacagacgctactagcgtctgtttttgtatcttgtagttgatatacatggcaatagaccttattctcaagctgactgcagactgccggaaaaataatgctagattcagctactttatattatgtaagcgccgctatgatggcggtaatgacgttactgaactatttaacctggcgaacaaataataataccccaggtacacttctttatattttctaccctcttgtcatgtttgcatcagtaatgagttttgcattacatggtcatattaataatgtagccagtatatcgattgccaactcactacttttttgtgcctcgatcattcatgttcttgccgtttgccaatttttcaatgctaagtgtgtcggtttcaaagcttttgtcggtataactgcagcatttgcgctacttatgatctacctctctactgacaattcagagttaagaagtcgcattttagtttctgatttacagcatgttatcgaagcgctgttcttattggcactgttcattcgcaatggccgcaaaaactaccctaatggcagcattgtctatattttaatactcagcattattcttgctatttttactggccgcactttattaatgggcgatattgctaaagcagacttattatcggcaaactggtttagtattaccctattcattaacggcgttatcgcacccatgttttatgccacgggtatggcattattatgtaatgaacgccgagaacagaatttaaatcaactcactgaaaaagcacaaaaagaccttgaaattcgcggcttatttttgtcaacaattagccatgaaattcgcacccccctaaatggtattttagggagcgcacaacttatcatgaaccaatcaagtgatcctcgcgataaaccttactgtgaagcgattatcaactctgcagaatctctcaatttactggttgataaagtccttgattatgcaagtctagatcagcgtgatgaagcgctttatgaagaagatgttgagtttaaaacttggttaaacaatttatgcttactgctaagcccacttgcagaacaaaaacatttaaagtttgagcttatttacgatttacctgctcaagcatgttactactgcgaccagcaaaaactaagacaagttattattaacttagtaggtaatgcgattaaatttacagaccacggcgcagtaaaaatacatgtaacgttacttaaagaaagacaattagatcatcttgttcgcatcagtgttatcgactcaggtccgggtatcgaagacgaagaaattatctttctcacagaaccctatgtacaaagcagtgcaggtaaagaaaaaggcggcacgggacttggtttggcaataacaagccgattactcgaaaagcttggaagtaaacttaatataaccagtgagctaaataaaggcagtacttttagtttcgatatttcacttgcgattggtgagctaagtcttgttgaacagcgccaccaatcaaaagactatgtcactgggcttgacgttttattggtcgaagatctcgatctaaaccaaaaaattgctatcgaatttatggccgatgacgagcacaaaattaagctcgcaaaagatggcaaaagtgctatagagttaatgcaaaagcaccactttgacgtagtgttacttgatatgaatttacctgatctcagtgggcaggatgtattaaaaaaactcaaaactgttgaccacttaaatcaacgaacaccggtgcttgcctttacagcaagccttagccccgatgaaataaaagaatacttggcgctgggaattaaagatattgtcggaaaaccaataaagcaacaaaagctacgccaagcacttagcgattcacaaacgaaccaggctgcgagcatagctgtcgagctgcgcgacactttgtacgatgaaacggctgcagcgacacttgtaagctcatttaatgaagatgaagtatcatcaatctacaacgaatttgttttatcagctcgtaacaagttgattcgctgtcaacaacttgtagaagatgataaagaacagtgcatcaaacttctccaccgccaagccagtaccgctttgcaattaggctttaaccgttacggcttagagcttaaaaaaatagagcgtaagttactcgacaacaaacctcttaaagactcgcttacagatacacttgtgctgtggcaagacagccttcaagcctacttaaaacatgtaagaagtgaattaacttagggaaagcgggagcgttaaaacctaaccaataaaagtttaagccggctgttctcaataaagaaacaaccggctcaatttagttaaaacttatagcaagtccctaccatacctatcatcaaatcgctcgatgtcgctttcatcaagtattgcaccggtttgtacttcaataacgatcagaggtgtggcttgttgattagcgaggctatgtaattgtttagccgcaatataacaagattgatcggctgttagctcaaactcgtcatcacctactcgcacacttgccactccagatacgacaacccaatgctctgcacggtgctgatggcgttgagttgagagttttgcaccgctgttgacgattattttctttaccttaaagccagtactttcaattaaagttcgatagttaccccaaggtctgaataccgcttgatggtgagtcaatttgtcattatcaataacagcaagctgcttaagtaaatcaggaagcttatcgagtgcacttttatctgccactaaagtggcatcatgagtatgaataattgcttgattactcacgccgagcgccgcaatagtgtggccggcttcgctaatgagtagattattttcgctatctaaactcacgccttgcgaggctaaatagtttccatgacagtctttttcagcgattttagagagtgctgaaaagctgccaacatcactccagtttaaatcaacaggaataacagcaacgttagcgctacgctccaaaatagcataatcaatagaatcacttgggcatgctgtaagcgcattcgctacaggccgttgaaaacctaaatctgcagtaaagcttgccgcttttgcgacactgtcagcaatctttggcgcaaaacgattaagttcgcttaaatacacatccggcaaaaataagaacatgccgctattccagccatattcaccactggcaaggtatttctcggctaattgccgggctggtttttctttaaattcagccaccttaaagcagccttcatgggctaactgctcaccttggcgaatataaccataaccagtatgtggctcagtgggtgtaatggcaaaggtcactaactgttgttgctggcaaagcgctatagcattatctaagcatgcaataagcttatcaaaatcacttatgtggtgatcagcaggcatgactagtaagggatccgttaggccattttgcaacgcaaattcagctgctaaggcaatcgctggcgcggtatttttaccttcaggctccagcagtagagtatagctatctgtgatttctgcaatttgcgctttagcaataaaacggtgctcttcattgcatactaaaatcggcgcattaaatcgtgagtcagccacacgtaaaagcgtgctctgtaacagtgacttgtcgctaagcaaagacaaaaattgcttaggcatcgctttacgtgacaaaggccataaacgagaacctatgccaccagcaagaataacgggagtgattttgcgactcatgattgcttaaagtaaattatccaaccatgagtttaacaaatttttgagtaggcttcttcgagcaattacagtaactgaaattgatcagcgtctaaatgagcaggaaaagcctttctaaagtcatctaaaggtgatttttctaagcgcttaataatgatacccgattggttatcttcaagcgctgccaaggtatcacctttaaaatcatatacagcagtgcctccgctatgggcaacatcattaccatcagcgccaatgcgattgacgcctacgacataacagaggttttccattgcgcgtgcttttaacagggtatcccacacatggcgacgagcagcgggccaattagctacgtttatcatcacatcatagtcgttgcaattacgctgaaatacaggaaagcgaaggtcgtaacacacttgcggtaaaatgcgaaaatcattaatagtgaatatctcgcgctgtgtacctgccgcaacaaaattgccttcgttacctaaacagaataaatggcgtttgtcgtaatactttacttcgccgtttggccaagcccaataaaagcgattggcctttttatcaccttttgcgactaaaacagagcctgcaaccacagcatttttttgcttagctgtggcttttaaccagctaagtacctcaccttgctcaggctcactgcaatctagattaatcgcaaaaccagtagcaaatgtttctggcaagacaattaaatcaacttgctcttttaagccattaagctgctcagtaaagtgcgcaagattagcgtttttatcaagccagtgcagtgaggactgcactaaagctaaggttaaagttgacataaaatctccgcggcgcgttttaatgtgtcatcattttttgcaaaacataaacgaatcactttgtcgctgcttacgctgttgtaaaacacactaagcggcacagctgcaacaccagcttgctctaccagccaatggcaaaactcaacatcatcaagatcagatacatcactataatcgagcaataagaagtaggtgccttcacttggtaaaattttaaagcgactgtgtgctagtgcttcgctaagtaaatcgcgtttttgttgataaaaaaggttcagttcatcaacatgctcaggctctaactcaagcatatcggcaagtgcatgttgggcgggcgtaaagcttgaaaaagtcacgtattggtgaattttacgaaactccaccattagctgagcaggcgcaacacaataacccatcttccagccagtgctgtgaaaggttttgccaaagcttgatatcacaaaactacgtgcaaataactcagggtcggtcagcgcacttaaatgcaaagcgccatcaaaggtaatgtgctcatacacttcatcgctgattacatataaatcatgcttagcaacaagtgctttaagggcgttaatatcttctgttttaaagattttaccgcttgggttatgtggcgtattgatgatgatgacacgcgttttgtctgtaatgacatcggctacggcttgccaatcaattttgtaatctggcgcatgcaaggcaacgtgaactgagcgaccaccggcaagttcgattgctggctggtacgaatcataagcggggtcaaacaccacaacttcgtcaccctctttgaaaagtgcttgaatcgccacgaacaatgcctctgttgctcctgaagtgacagtaacttgttgctcataatttatgttgttatggtattttctagcaatcagtgcggctatttgctgctgcagccttgcaacaccacttgaaggtgcatattgatttaccccctcaagtacataatgattaagctgtttttttagcaattcaggtgcatcaaactcaggaaaaccctgagataagttaagcgcttggtacttatttgccagagcggtcatttgactaaaaatgctggtgcctaaattcggcaatttactttcaaacacagaggttccttaaagatggttttgcgcccgaagcgatgctatcattgcttaaaacagatgtatagccgtctaaataatttttagaatgtcgaggaatatatgcataacaataccgctatttcagaactaattgaagccggtaaatgggtaagtcaacgcggttgggtccctgctactggtggtaacttttcagcccgcacagcaagtggctatgttgtcacagcaagtggcttcgataaaggccaactcggcactcatgcgtttattgaatttgatcatgaaggtaatcgcactaagggctcaggtaatccttcagctgaaaccgagctgcatctaaatatgtataagctgatcccatcagcaaactatgtcttacacactcattcggtagcggcaaccgtgttatcgcgtgttattaaaggccatactatcaacttacacggctacgaaatgcaaaagtctttaagtggtgttaaatcgcatttagatacgctaagtattcctatttttgataacgaccaagacatcgaccgtttaagtttacttgtcagtgatcatcaccttcacacccctattgagcatgccgtattaattcgcggccacggtttatacgtggttggtcgcgatatcaaagaagtactgcgtcatttagaaggcttagagtttttgtttagctgtgaacttgagcgcttaaaactagaaggcattcaagctggagttcagccatgatcaaagcgattttaaccgatattgaaggcacaattacccgcatttcttttgtcaaagacgtcttattcccttacgctgcagggcaattacccgagtttgtaaagtcacatcaaacagatccagaagttgcagcccaaattgatgctgttaaagcacatattgaacaaccagaagccgatattgacgcggttattaagcatttaattcattggatagaaacggaccaaaaaattactccacttaagcaattacaaggattaatttggcaaactggctacgaaaatggtgattttactggccacctttaccctgatgcttatgactttttacaagcccaaaaacaagcgggcaaaagtctctatgtgtactcatctggctcagtaaaagcccaacacctgatttttgagttttctgattatggtgatgttagacctttattcagtggttacttcgatactaaagtaggcgcaaaacaacagcaaagctcttatgagaatattattgctgaactgccttttgacgctgaagaggtgctatttttaagcgatgttgaagcagagcttgatgctgcaaaagcagcaggtctgcgaacgcttcaccttattcgagatggccaagaagcaagtgatatccacccatatattaacgatttcacagcattcagcgcggagcttttagtatgagccaattaactatttttaatgatacaaacgcagataacatactgtttcatagtgaagatttaagcgctattgctagagagcttaatgcggttggcgttcgctttgagcaatggcaagcaacggcacagattgatcaagacaccagtcatgacgctattttaactgcctatgctaacgatatagaacgccttaaggctgaaggtggctatcaaacagtggatgttatttcgcttgcaaaagggaacccaaatgccagcgaattacgcagcaagttcttatttgaacatactcatagtgaagatgaagtgcgcttttttgtgaaaggccaaggtttattttgcctacacttgggcgataaagtgtatcaagttctttgccaacaaggcgacctgatttcagtacctgagcttacaccacattggtttgatatgggcagtgatcctgaattcacagcaattcgcttattcaataatactgaaggctgggtcgcgcaaagtactgagtctgatattgctaacaactttccccttttggattaatatggaaaagctattttcgtacggtaccttgcagtacccacaagttcagttagatacctttgggcgtttgctcgaaggtcaaccagccacgctgacagggtatgtagttggcgaagtagagatcaccgacgaggccgtacttaaaagcagtgggcaacgttttcatcctgcattattaaaaacaggtaatgaaagcgattctgtgagcggcacaatctacttaattacagagcaagagcttgcacaagcagataaatacgaagtggacgactatcaacgcattgcagaaaaattcctctgccatactaatgcgtgggtatatgttgcaaaaaatagtctttaatttacaaaaataaaacaaaaaaacccaattacagtacaacttctgttattatcgaccccattaataagtactaattatttgctaaaggactaaaaatggggtcggcactttcacccttacgcgataatgttatttttgttggcgaatggcaacttaatataaaacagcaaactatcagtgacggtgttcacacccgcgaattagaacctttgctttttaaattgctctgcttttttattgaaaataacgagcgaataattactcgccaagaactggttgaaaatatttggcaacaaagttttgttgatgacaatgctataaaccgagctatctctgaactaagaaaagtactcaaatcagagaaacagccaggtcaaaccattaaaacccattatcgtaaaggctacagcttattcattgcagtgcgacctcttgagcagacacctattgctgaaccagtagtagtggcaaatgaagaaacaaaacctcacctaagcactaacaccatcagcgagaaaaacactcactcatcgcgctggccatggccttttgttgccttagtattaagtttattgattgctgctacttggttgtatatacaacaaccccaagccaatgtcgaaacccaagagcaagtaccatttttagatcttcaagccgaaaccattacttggcataaaggcacgcactatcggttattgctaagccaagacaaaacgaaactggcttacatactgcaaaatgataagaaacacctttatgttgtcgacttaacaactaaacgagagtaccagattgcatcaggggagctatttttacaaggttggtctgaagacggtgaacgcttattttatggttcatgtgaaggggatgattacaacgattgtattacttggcaagcgagtaacctgctatctaacgaagcactaataaagcctcgaacaaatcaatctgtactaaaccgcaccccaagccaatacatggaagtcggcaatgtggcaattacaaggcgtaataattaccgtggtttaactcacctatatgctttgtatgcacaagatttaaaaacaggtgaagagattcgcattacctcacctaatattacaggcacgggtgactttatattaacgacgattcaaaaccctagccgcattatttttgaacgccataatgttgcccaagcagaaatttacatggctaatttagacggcagctcactaaagctattaacaactaacaattaccgctcttgggctgcgacttacgatgagcaaagcaactcgcttgtttggtataaccgcggtaaattgacgattgaatcattttcgtttgataccatgagccgtgggcaacctattaaagcccctgtaaaacgagccaattacgcttaccctcttaataaacatagcgtgctaattagcacagatatacacgacagtgatgcagctttatttgacttaaaatcaaaacaaatgagctatattgcgactgcaaataagcatgaggatgacttagttgcattaactaataatgatgtgtatttcgctgactttgaatactacaaacgccaacactggcttcgaaaagataaccaatatatcgatataaccgataagcttggtgaagatactgcgattattgctgcaaatagtagcagtagtaagcttgttagctttaataaaaccaatcagcaattaacgctactaaatgcgaatgatttttcagaaattaagcattggacactaccagggaacactaaactggcagctgtcagaggtaataagattgccgttatttataccgagcttagtagcctgcaaaaccaaataatgattttgcatactaacagcgatgaagttgtcaaaagtaccatcgacacccctttggcaattgcttggtatgacgaaactcagctaatagtgcattctaaatatgaaaaatacctgcttttagatagtgacagcaatacttacagtgaactaacaacgccagataagttaaccgagctgaagccttcaattatctcaatgacaagcaaccaacacagcttgtatattgccacggaaactgaagtgtatagcattaaattagcaaacctgcaggatgtcgaattagctctgcaaatgcagcctttgcactttattagccagctcaatgcaagtaatgacaagctcgcaatttcattcttaacagcaaacagtcaaaacagcattgagctttacacagaaaaaagcgctgaataaatccgctattttaactgctttaaaataccttgctcgatatctgcttggttataaaccccggtatcgagcacccaacctgttactaaattagcaggtgttacatcaaacgctgggttataaacctgtgcattagtcggtgcccagattgcttcaccaaaactaccactaacaccgcgcacttcatttacactgcgctgctcaatttcaatgtcattaccacatgtcgtttgcgtatcaagcgtagtcaatggcgcaacaacataaaatggaatgttatgaaaatgcgctaatacagcaagattataagtgcccactttgttagcaaaatcaccgtttgcagcaatgcgatcagcgcctacaaaaatcttatcaaccttacctgccgccattaagctagctgccatgttatcgcaaatcaaagtataagggatttgccaacgctcaagctcaaaagctgttaagcggccgccttgcagtaacggtcttgtctcatcaacccaaacatgaatatcaccatggcgttgctgcgctttataaatcactcctaatgcagtacccacacctgctgttgctaatgcaccagtattgcaatgagttaaaatattgtcgcctttggcaaccaaagccgcaccacgttcagccatactatcgcaaagtgcaatatcttctttaaacaactgctcagcggtagagacaacagcagcaacaaagtcgctctcagtcaacgcttcgcgtaacttggccatacagtgcattagattaacagctgttggacgggttgcttctagctcatctatggcgatagcgagtgaggcttggctcatgccctgctctgctaaatgtgcaacgagtaaactagcgcctaaacctattaacggtgcaccacgaattttcagtgtcaaaattaaatctttcatcgtttcaacatcattgcacacatgccaatgctgttgatgtggcaacaaatactggtcaagtacagttagcgtaccttgctgatatttaatactactcgcgatgagatcttgcatactgaatccgaataaataatgaaaaactaattttattgaatggttattttacatcagttttgacaactaacaagctagatgtatggacatctaaatggttacaagtatagaatgcttaaagtttattgttttatgagatagagccatggctgattacaccgccttcacttcagagcatgctgttgattacattaaagaacttgttaaaagtgaactgatttcagttttccctgctgatgcaatactgactgcatacgagtttggagacggaaacttaaatctggtttttcgtgtaacggatcaacacaataatagtgttattttaaaacaagcccttccctatgctcgttgcgtaggcgaatcatggccattatcacttgatcgcgcacgcatagaagctgatgtgctcattaatcacggtgccttatgcccagaacatactgtcgctattttgcaccataatgcagaacttgccttaacagtgctggaagatttagggcatttgcagattttacgaggcgcgcaaatcaacacagagcaatttccgctactggcaagtcatgtcgcactctatttgagtcgtactggtttttataactcagacttctatttatctgctgaagataaaaaagccaaagtgagtcagtttatcaaccctgatttatgtaagatcactgaagatttattctttactgacccttacattgagcatgagcgcaataatttccctgctgagcttaatgagcacgtcgaaagcattcgcaataatgacgctttaaaactagccgcagccaaattaaaagctaaattcttatcttgtccgcaaactttattacacggtgatatgcatagcggcagtatttttgtcgatacaaacaccaccaaaatgatcgacccagagttcggattttttggccctgttggtttcgatatcggctcttttatgggcaatttattgcttaattactgcgcgcaaaatggccgtattacaaatcaggcagcacgccgtcaatatcaaacccaccttctaacttgcttgcaggattgttacagccaatttgaacaacattggctaaccctagcaagtaacgaagcaacagatattagctttgcaaactgcgcttttactgaagattatttacaacaagtattacacgatgcgattggttattgtggcgctgagcttattcgccgcaccataggtttagcccatgttgccgatatcgatggcattgacgatgtaggcgctcgccttgctgtgcaacaacaaacgctggtactcggagagcaattaatgcttaacgcgacaagctgcaataataaagatgagtttttctctttactggttagcttgctaaactaaaaacaaaggcgctaaacgcgcctttctaaatactttactgataatgctcgtacattttatctagcggctcagacaagccattttcttgcactacgcgcacatgatgacgagccaattctctggcactggatacaccacatgaatgggcaatcaaacctgccccataatgaatatatttattatagttagcaacacgctgagccttgtctgtgacatctaaacctcgttgtaagcgctcattgtgggtcgtaatacctgtaggacaagtatctttattacattgtagagcttgaatacagccaagcgagaacatgtgaccacgagccgaaacaataaagtcagcacccagcgctaatgcccaagcaacttttgatggcacaattaacttacccgatgcgataacctttacacgctctcttagaccatgttttttcaaaaggtctacaacaagaggtaagctttcacgcagcggtaaaccgacagagtccattaacggctgaggcgctgcgcccgttccaccgtcggcactatcgatcgtgataaaatcaggcgctgattcaatgcctcgattattaatttcactgaacaaggtttcaagccaagtgtattcaccaatcactgctttaaaacctgttggtttacctgttgtttctcgaactgtcgaaatcatatcgagtaagtgggctggttcttttatttctggatggccattagggctaatcgagtcatgcccttcggggatcccccgaattttggcgatttcagcggttactttgcgcccaggcaacataccgcctttgcccggttttgcgccttggctcattttaatttcgaacatcttaacttgttcatgctcggcaattgcttttagtttttctaaacttagcttaccttgctcatcacgcacaccatattttgccgtaccaatctgaaatacaatatcagcccccccttcgagatgataaggactcagtccaccttcccccgtattcatccaacaaccggctaattttgcacctcgtgataaagcacgcacagcgggttttgataaagcgccaaaactcatgcccgaaatattgaataatgcattggtagaatagggcttctcacagtatggacctaaggtgacataacttggctctaacgcctcttcatccagttttgggaaggcgcagttcataaacatcacagtccctgtggcttctaggctttgtgttgaaccaaacgcagtagtgcgatcaacattttttgctgcacgataaacccagcttcgctctgcgcggttaaatggtaactcttccctatccatagcaaagaagtactgacgaaagaattcaccttggcgttcaaagaaatagcgaaaacgtcctatcaccgggtaattacggcgaatcgcctgcttagattgcgtcacatcactaatgtaaaagcacacaatcaccagtaatccgatccctagtgcaaaaataaataaactggcaaatacatcgatactaaaaattataaaatcactcatccaaggcccctttgtgaaatgacatctttcaaagcatataaggtgtttatattacgtgcaataaacaaaaaaggcgtgatgtaaatcacgccttttcgtcttttatactgctatgctgctcgtttggctaattcagctttaatgtaaagttgaatttgctcttcaagcaccgacattggcactgagccatgtcgtaatatttgatggtgaaattcacgaatatcgaaatcttgaccaagtgcttgctcagcttcgtggcgtaaacgtttaatggttagctcaccaattttgtatgacaacgcttgtgcaggccatgaaatataacggtcagtttcggtcttcacgttatgcaatgaaagcgcggtgttttcgctcataaactgcattgcgcgttcgcggctccagccatacatatgcatacctgtatcaaccactaaacgtgctgcacgccacatttcataagtcaaacgaccaaaatcactgtatgggtcttgataaaagcccgcttcgatacctaaaaactccgaatataggccccaaccttcaccaaatgccgacaaatatgcattacggcgataacttggtaatgactcaagctcagcattaagtgaaatttgtaaatgatgccctggtacagcttcgtgcaaagttaatgcttcaagtacatacaacgggcgcttatctaacgcataggtattaacccagtagtaacctgcttggtcatcacgacgagaccctgagtaacgccccgttgtatattttggagctatgctcgctggcaccggtgcaacaccatacggcattctcggcaaggtgtggaacaacttaggtaactgcgcatccattttcttggcaatgtaagacgcttcttttagtagctcttcaggtgtttttgcgtaaaattgcggatcagtacgtaaaaagtggacaaaatcagcaaacgagccttcaaaacctacttgctcaataattttttccatttctgcacgaatacgcgcgacttcttgtaaacccaactcatgaatttcttttggcgtcatatctgtggtggtgtagtaccttgcgcgattttcgtaaaacgctttaccgtttggcgtacttgaaataccaatttctgtacgtgcacccggttgatattcattattaaagaaggttaagtaaccttgataagctggaataacctgctctttaataatggtttgcgcttgcttttgtagagctgcaaattcgctatcgctcaggcccgcagtgttatttaaaaatggtttgtagaattcagacttagtagcatcatcaacaatataagccgtgattgagtcttgatagccttctaacacagccttaggttgggttagccccacctcaagccctttgcgcatccaaccgatattttgtgtgaaatagcggggaatttgctgcaattttgcaagatatagctggtaatcttttgcttttgtgtaatctgagatggaaatcataaatgataagctagagtgaaaaccgtactcagaagtcagcggcatatagtgcgcattaaacacatattcatcgacactattttgcacttggccacgcaaaatagtcaggttaatgcgattttcttccgataatttatcacggtcgatagcgtctagctcggcaagtaattgagtattctttttgtactttttctctaaaaattcagccgacaagttttccagtaaataaccgtcaacgccattttcctttccataagggctaatactttgacgatagttaacaatttcttctgcgacttgattaaactgctgatcagcgtcaattttggtaacctgacaggcacttaaagtgcaagctaacgcaacagcaattagcgatagatttacagtttgcgataatgagtgtttcataactttcttattcgttttgatctgtgcagctaaattagctcagctcagattaaaacccaagcaaatgcgaccaagctcagattaattacgctcaaataaacgcccaactgacgcaacgaatgaacaagctttaaacaatttatgcttatacatggcaaagttgtagagaaaatcagctaatagacccaaacaaaacaaatttaagttccaaatttggcaattttgcttttaaatagactgattacagattactgtagactcagtatttatgcttggaagcaaatgcactttagggacaagatgattaattagttgatatgcgtatttagtggtattgaaaaatgatgttccatgattccatggctattgctcaagaaaaaatgacgaaggtatgtatctttttagaacatcattcattaccgccgtcaccacttaactaccacgtcgtttatacctatgtcagccaagctaaccaaaaactcaataccgcaatagaccgtgctattgctcaaaagaaaacaatcgacagcgtttacgtagaacaactgtatttcgattttatggaacaaggctataaaatgaatacagcaattgttcgtaatgtcgactccgttataaactcattatctcgtaatgcgaatacgaatgagcaaaacatgatccgctttgctgatcaagttactgattgcgtgcatgccatagatgaaaacaacctagagcaaactcgccacgcactgaaaatgcttagcaagcagtctgaagtattactaaatcagcaccgacaatttaaacaagaaattgcaaaagctaaatcactccaagaaaaaacccaaaaacagctcactcaacttcgtaaacaacacatcactgatccacaaaccgggttatataaacgccattacttaaatcagcaaacgcaattatggattgggcaaaacaaggcggtgtgtgccatatcaattcaaattgaaaaccttgatcactttataagcaactatggtgatgtgattggtgaagtgattttgagtaaagttgccaaacaagttcaaaagtatgtattagagagcggtttaccgggtcgtactggcaaagacgaatttactatccttcttgctgacattgagcctgaaacagcaaatttaatcgctgaaaaagtacgtaatggtgttgaaaagctgcgttttgttagttcaaaaaatggcaccaaattacctgctatcacgctcgctttgggtatagcaaagcacgaagaaggtaatgattttaattacctagcacgaaaagcctcattagcagcagcaaaagcaaaatcattgggtcagagtagctatattgcaggtcaataacatctaatcctgttctaagtcattaaatacaacgctaatctgatgatttagttataatcaaattgcaccccatagctacaatcaagtacactagtctttattgccacgatagagattaatcatgaacgagaatcaagaaaagaccacgcattttggctataaaaccgttgctgaaaacgacaaagcatcgatggttgctgatgtatttcactcagtcgcagcaaaatatgacgttatgaatgacttaatgtcattcggtattcatcgtttatggaaacgccaaactattgcaagttcaggtgttcgtaaaggccactacgtattagaccttgcaggcggtactggcgatttaaccgctaaatttagtcagttagttggcgaaaccggtcaagttatcttaggcgatattaactcttcaatgctcaaagttggtcgcgaaaaacttcgcaacttaggccgcgtaggcaatattgaatacgtgcaaatgaatgcagaagcattgccatttccagataatagctttgacttaatcacgattgcatttgggctacgtaatgtcaccgataaagataaagcattacgttcaatgtaccgcatccttaagcctggcggtcgcttgctagtgcttgagttttctaagcctgagcatgaagtgctgagcaaagcgtatgacttttactcattcaatatcttacctaaaatgggtgaactggtagcgaatgacagcgagtcttatcagtatcttgctgaatcaatccgtatgcacccagatcaagaaacgttaaaggctatgatggaagatgccggctttgaacaaaccagttatcaaaatctaacgggtggtattgttgctttacaccgtggttttaaatattaaacctaagcaggtaatgtgatgttagctaacgctctgttgtcacttgtagaacgcattattaatcatgtgttgcaattagatcccgctgttaaaaacaagcttgccagcattgctgacaagcaacttttaattgaaatacgcgattggcaacagtccattttgtgcgtttacagcgacgagcaaattcacttatacagtacgcaagagcgcagttttgattgcatgatcagcgccgatatcaacaccttgttggcccttaaagatccatcaatgcttacccagctaattcgccaagataaactcgatttacaaggcgatttaaatcttgcgcaaggctttagcaatgcgtttgcagagattaatattgactggcctgaacacttttctcgttatattggcgatgccccagcgcagcaactatggctctctttacaagccttaaaacgccgtgggctacaaacaaaaagtaagctagaaaataccttaacagcgctttgccaagatgagctagcggtgacgattcacccactagaacttgctgaattcaaacagcaaaatcgccaattaaaaagccaagtatctcaattagagatgcgaattaacgcgctgttacagtcacgctaatgcgctaaggaacttgtgtgtcgtctgctcgtctttattacatcacaaaaacgctactgagctatggcttagacgaattaattccgcgaaaaagagtgccttggtttgcaaagctcgcccgtggcagcttattttggttacgtaaccagcataaagataaacctgctggtatgcgccttcgacttgctttgcaagaacttggcccggtgtggatcaagtttgggcaaatgctatcgacacgccgtgatttactccctcatgatgtcgcgttagagcttgcattacttcaagatcaggttgaaccatttgaaggtgagcttgctcagcaacttatcgaaaaagcactgggtatcaatgatatcagtgagttatttagtgacttttcgcaaacacctctggcatcagcttcgattgcacaagttcacacagcaaccttaattgatgagcatggcgcacctcaagatgttgtcattaaggtcattcgcccaaatattaaagagcaaattgatgccgacttaatgctaatgcaaaaagtcgcacgcttagttgctaaattattaaaagaagcaaaacgtttgcgccctatcgaggttgtaaacgaatacaaaaaaaccttgctggatgagctcgacttaatgcgcgagggggcgaatgcgattcagctacgccgtaactttgaagattctgaatcactctacattccttttgtttacagcgattttagccgtaataacgtattagttatggagcgtatttacggtattccggtgtcagataccgacgcactgcttgcacaaaataccaatatgcagttgctggctgaacgcggtgtcgaagtgttttttacgcaagttttccgtgacagttttttccatgcagatatgcacccgggtaatatcttcgtgtctcgtgaaaacccacacaacccaaaatacatcggcattgattgcggtattgtaggcacccttaatcgcgaagataagcgttatttagcagaaaactttattgcctttttcaatcgtgattaccgccaagtagcgcaactgcacgttgattctggctgggtacccgccgataccagcattgaagagtttgaatttgcgattcgtaccgtatgtgagccaattttcaataaaccactggcagaaatttcttttggtcatgtgttagtcaacctgtttaatacggctcgtcgctttaatatgcaggttcaaccacaattagtgttactacaaaagacgctgttgtatgttgaaggccttggcagacaactgtatccgcagcttgatttatggaaaaccgctaaaccttttctagaagattgggtcaaagaacaagttggtccgcttgctgtaatgaaaaaaatgtatgcgaatttgccattttgggcagaaaaaatgcccgaattaccagatttaatttatcaaaacttaaaacgtcaacaacaacctgtacaattgccagcaccgcaatcagctaagcctttgttactaagtatctttgctggtagctgtttgattgtttcaggcttatgttatttacagcatgacttagtcgccagtgcaattacggcaggccttgctgtagcaggctttattgcagcatggcgtagcgcataaactaagtgctatttatgttttggtgagtataatcgaaacaagtctattcaataaatttgataaaaacggagtaacccatgggttttggtggtatcagtatttggcaattaatcattattttggcaatcatcgtgttgttatttggcacaaaaaaacttcgtggcatcggcggtgatttaggtagcgcagtaaaaggctttaaaaaagcggtgtctgatgatgaccaagctaacgctaaaagcgagaaaatagaacaagcttctaacacgcaaagcaaagaaaccgtagagaaaagcaaagacgaccataaggcttaatcaacatggggatgtgggaacttgttgtcgtactgatcgtgggtctaattgtattaggccctgagcgtttgcctgtggcaattcgtacagtaagccgctggataaaaacgttaaagtcagtcgccaactcagtgaaagctgaagtgaacgaagaactccgtatccatgagcttcacgaaaatttaaaaaaggcagagcaacaaaacttgcaagaactgtcaccagagctgcaagactctgtaaacgaacttcaaaaggctgctcagtcagtcacccacagttacaaaaaagacacgcctgaaaaagcagaaactaataataatgacgaaaaaaagtgaatttaaactctgtttttgtggtcaataacaacgatgatgaatagtaaactatgaccgagcaagctcacacaggctttgttggccacttaattgagttacgaaatcgactcatgaaagctttgttaagcattttgattatatttattagcttggtgtactttgccaacgatatttatagctttgttgcggccccattaatcgcacacttgccaagcactgctactatgatcgcaacggatgtaacagccccattttttgcaccgtttaaactcaccttatttgtggcgttatttgctgctattcctatgatactgcatcaagtttggagttttatagcaccaggcttgtatcaacacgaaaagcgtatgctcatgcctattttggcctctagtatcttgctattttatggtggtatcgcattttgctactttgtggtgctaccgattattttagggttttttactaacactggccctgatatgatgacattagcgcctgatattagtagctatttaagttttgctttaaaactgttttttgcttttggtattgcgtttgaaatacctgttgccatcatgctgttatgctggagtggcgcaacaacaacgaaaagtttaaaagaaaaacggccttatatcgtggtaggtgtatttgtgattgctatgttcttaacaccacccgatgtattgtcacaaacattactagcattacctatgctgttactatttgaattaggcttaattttggctgcattttataccgccaaacctcaacaggaatcagaggaataaaatgaaaaaacaactcatccctttcgtcgctcttctaacaattgctggtactgcccaagcaaacgaggttaacttacaggcattacaagcctgtacttttgttgaaaacgactttaaccgtttactttgttacgacaatgtaatggcaggtaagtcgctatctaagccggtaaaaaagcaacaaattgagcagcctaaaatgagctctgcagctagcgcagctagtgcagctagtgcagctagtgcagctaccactgcgactactgaggccgcagcaacagttgcaactaaacaaagcgagcaaattgtaaaaacaaaaaatgaagactttggtttagagcataaagaagttgcaaaagtaaacgatgatcaaattaacgccatcgttaaaagcgtaaaaactgcgccttatggcgagctaatcatcgaacttgaaaatggtcaacaatggcgtcaaatcggctctgataaaataaaactgaaagttaatgaaactgtaattattgagcgtggtgtcttcaattcattcttattaaggattgaaggtcaaaaccgctcgattcgcgttaaacgaacagattaatgaacattcaactggttgatgcaggtgtcaaccttagcaatcatcagtttgatgaccgtcaccaagaagtgttacaacgtgcaagcgatgccggtgtaacacaaatgctattgattggctgcgatttacaaagcagccaagcttctctgagccttgctaagcaattttcgcagcttagcacagcaggagttcacccccacgatgcaaaaaccgcagatgatcggctggaagagcagttaatttcccttagtcaacataatgaagttgtggctataggtgagtgcggccttgattataatcgtgatttctctcctcgagatattcaacgcaatgtatttaggcgacaacttcaactggctgagcagctagatatgcccgtatatctgcatgagcgagatgccagtgaagatatgcttgcaatcttgaacgaacataaggtccgaggcgttctacactgctttacaggtgatgaaactgcattacagaattacctagcgttggggctttatattggtgttacgggttgggtctgtgatgaacgaagaggcgagcaattacaggcactcattcctgctattcctctcgaacgattactgatagaaacagactcccctttcttaatacctcgaaatatcagaccaaagcctaagtctcgccgcaatgagcctcagaaccttccttatatatgtcagcaaattgctgatttaaaaggctgtgaatttactgatgtcgcaaaacacactacactaaactttcagcaattatttaccactaagggttaagatgaagcgcctatggtcactatgtggcttactcttcgttgttttttttactccctacttgctggctaactcgattaccgttggcccacactttaagtctcttcattcgctaaatgttgagtacacgcttgatcccattacaaagcaacaagcattaacgaatcataacgtgtcttggcaaactaaccatggcaaaacgctcaacctaggtatgaacttaagtcctttgtggctaaagctgccaattgaaaatacatcgttacatgacttgccgctgattttatctattgataacccgttactagacgaagtgagtgtatttcacctgcaaggtgatcatgtcaaattcagcacgcgaattggtgatgcacttcctttagaaaatcgacaaattaagaatgaatcactcctcgtgtctttgacgcttcctaaagcaagtcattcagttgtttatttaagagttaaaaataacggcggcctaagagtgcctttaagtctgtgggaaccctctgagtacctaaaaaataagagtaaattcaatttactttatggtttactggtgggttttattctctctttagcaatcactaatttagtgctttatggtttttcaaggcgcagctattttgcctatactggctttttgctgatgttgttatggctatcactcgcctacctttatggctttggctatcgttacctgcaacctagtggggcatcatttcagcaattaacaattccaagcttgttttttatttgctgtgcactgtttgtccccttacaacgttacatttttagagcagaaaagactcgcttaagccgcgtgcaaaattggtttgcatggagtgttgttgccaccactttcgtgttatggcttttacctgtttatgttgcaatttcgctatgcttattaagcttacctattctgctatttgccttcacagcgatagcaattaagcagtttaatcgcgactataaacagccatgtattgcctttattattgggctattagcattttgttctgccattatttacagtgcatttgctgtatttaatccattcaatttatatatcaatgagcaatctctgatcttcattttctttttaatttgcagcttgagtttgagctatgctgttataaagctttttataatgcaacgagatgcagaagtagccgcacaacagacagctttggcgcaaagtaaagcacaagatatcctgatgcaagaacgcttagagcttcaagaacaagcgcgacaaaacctagaagccaatattgaagaacgtactttcgagctacaagtcactctgcgcgagcttgaggagaaaaaccgcgaacttgaacagctcaatatggaagatgcgctgaccaaaaccaaaaaccgccgttactttgataagaaactactaatggatgttcgtcgctctcgccgagaacaaacgccattggccattattatgttcgatatcgatcattttaaagcaattaatgatacttatggccatttaaccggtgatcaaacaattcaagcagctgccaatatcatcaaagcacatttaaaacggccacttgatgaagttgctcgttatggcggtgaagaatttgtagtacttttacccaatactccactcgatggagccatagaaattgctgaacaaatacgcaattcggctgagaatgctgatataatagtggccggaacaacgctcaaatttactttaagcgcaggtgtttacagtgcaatagctgatgacatcaatcatccaagtttatttactgactatgccgataaagccttatatcatgccaagcaaacagggcgtaatcgggtagtgagttatcctctaccagactaggagtacacaacgaatggcccaatcaggactcgaccttttcccttatacacgtatgcgccgcatgcgtcgtgatgacttctctcgtcgcctaatggctgaaaaccaactaaccgttaatgaccttatttttcctgtatttgtgttagaaggtaaaaaccgccgcgaagccattgagtctatgccaggcattgaccgtctttctattgatttactacttgaagaagcaaaagaactcgttgaattaggtgtgccagcagtggcgattttcccagtaacaccgagcgataaaaaatcgttgctggctgaagaagcctataacccagatgcattagcgcagcgaacagtacgtgcattaaaagaagcatttcctgaacttggtgtgatcactgatgttgcgcttgaccctttcaccgtgcatggtcaggatggcatcattgatgaaaatggttatgtgattaatgatgtaacaactgaaattttagttaagcaagcattgtcacatgctgaagcaggcgctgatgtagttgcaccttcagacatgatggatggtcgcatcggtgcaattcgtgaagcattagaagccgaaggccatatccatactcgcattatggcttactctgctaaatacgcttcaagctattatggaccattccgtgatgcggtaggctcagcaggtaatttaaaaggtgccgacaaaaaaacctatcaaatggatccagcaaattcagatgaagccttgcgtgaagtagcgttagatctacaagagggtgcagatatggttatggttaaacctggcatgccatatttagatgttgtacgtcgtgtgaaagacgagtttggcgtaccaacatttgcttatcaagtgagcggtgaatatgccatgcataaagcggctattgataacggctggcttgcagaagaagcaataatcatggagtcgttattagcatttaaacgtgctggcgccgatggcattcttacttactttgctaaacaagcagcccaatggttgaaaaacaaccaacgctaagttagatatataaaacggtacaactattaccgttttattaacaatttgtatttaatttgtcatagattttccttaaagtatgtgtcccattttgggactattaacttacatacacgggaaaaataatgataaagactaaattgacgccgctcgcgcttgtaattgcaagcctgagcgcgccggcttcagctaacctaatcatctctgaatacgttgaaggaagttctaacaataaagcggtagaactatacaacacctcaggtgcagaactatcgcttgatggttacaccatttctttatactcaaatggtaatggcgatcttagtgctcctaataacaccttagatttaactggtacacttgccgcaaatgcgacttacgttattgtaaacccaagctctgcagatgaattaaaagcaaaaggcaataccgaatcaacaatcacttatttcaacggtgatgatgcattagttcttactaaagacggcgcaattgttgatagctttggccaactaggtgttgatccaggttcagcatggaatgaaggcggcgtttctacacaaaataaaactctacgccgtaaagcaagcgtgaccacgggtcgtactgatgcaacatcagcattcaatccaagcgatgagtggcaacaattcgaccaagacgatttcagcaatattggtttatacggtaatagcacagagccaacacctgaacccgatccagtaacaccacttgagtgtggcgcaacaaaaacgctaattagcgcaattcaaggtgaagggggtgatagcccactaattaacactgaggtcgaagttgaaggtgttgttacagctgacttccaaggtgatgagcaactaaaaggtttcttcattagctcactggctgctgatgttgatacaaacccacttacctctgaaggtgtattcgtttatttcgcagataccgacgttgctgttggtgaccacgtacgtgttaaaggtagcgtggctgaatacttcagcgcaacacagctaggcgatgttagccaagtagagatctgtgcgacaggtttatctaccgatgcaaccgctatcactctgccagttgccaacgttgcagaccttgaagcttacgaaggtatgttagttaccatagcgcaacctctcgtggttaataacaactacggtcttggtcgctatggtgaagttgacttaggtactgaacgtttataccaaggtactcaagttgcgctgccaggcgatgcagccaatgctgttgaaactgaaaacctgaaaaaacaaatcttacttgatgatggttcaacaaaacaaaatcttgacccaattgcctatcctggcactggtcttgatgcctataacacattacgtttaggtgacactgttaatactattaccggtgtgatgggctacagcttcgaccgttaccgtattcacccgacagtacaacctgagtttattgcatcaaacccgcgtacagatgcaccagagcttgcagaaggtgctgatttacgagtagctagctttaacgtattaaactactttaatggcgacggtcaaggcggtggcttcccaacaagccgtggagcagacagcgaagaagagtttattcgtcagcaagcgaaaatcgttagcgcaatcactgctattcaggcggatgtaatcggtttaatggaaatcgaaaacgatggtttcggtgaaaacagtgctatcgccaccctcgttgcagcactcaatgatgaagatacagaaaatagttacgcttttgtggactttgaagttgatcaaattggtactgatgcaatcacaacagcactgatttatcgctcaaataaagtaactgaagttggtaaggctgctcataccacagtagcacctttcgattacagcaatcgcccgccaattgcacaaagcttccaatcgcttgaaagcgaagaaatcttcacggttgcagttgcacacttaaaatctaaaggtggctgtggcagcgctgagggcaacaatgctgacttaggtgatggccaagcatgttggaatgaaatccgtgttgcaggtgccaatgcgtatgccgattggttagcgacttacccaactgacattgaagatgaagacatcatcttagtaggtgatatgaacgcttatgcaatggaagatccaatccgtgcatttgcagataaaggccttaagagtgcagttgctgaattagacggcgacaccttaggttactcttatagcttctctggcagaattggtagccttgaccacgcactagtatctgagtcattacttggcaaagtcgttgcggcgacagattggcacattaatgcggacgaaccaatcagcctagactataaccttgaatttaagtcttcaacacagcaagctggtctttatgctgataacgcataccgtgcatcagaccatgatcctgtgattgttgatattaaatctgcagagcctattcctgcagagcaggcgccagtaatcgaggcaaaccaaacgtttaatattgttgaaaatagcgaggtaggtactgttattggacaacttgtattctctgatggtgatgctgattacacacctgttgtaagctttaatattactggtgagcatgctgatgcaatcgcaatcagcgcaacaggtgaaatcactgtagctaaagtacttgattacgaacaacaagatacattaacactcatggttcgtgctgaagatagtgcgggtaacttgtcacaagagcagcaacttaacatcaatatcactaacgatgaagcagatgatactcctgacgaagttgaagaacagccgaaagataatgattcaggttcatttgcttggttaagcttactttctttaccatttgtattacgccgtcgtatgaaaaaatagactgcaaaatcaataactaaaaaggccgcttttgcggcctttttaattttttaatggagtaacaggatgcttaaattgcttctttacgttgctcatctggttggtagagagctgttattgcgctctgttgctgctcatcgatttgccaattaaaaaagctatatgttttaccattctcaagaaaaaccttaaatattgtcataaaggtcgttgatttaaactctacacccttgatgtcttcagcattgatataacgcttgcctatgcccaatgaatagcatattcccgcattgtaacaatacaaaaaacgcatccctaacaagctcaataccggaaaaaaaagcaacacaggtaatataaaaattaataacgaagcatcaaaaaaactgcttatcaatgcaataagtatagccagtgcgatcgtgcttccttgtaaaatccaattcggacctaacttaatcgttttcatgagtataaatctttaattgatagttaaaaggtgaaaattaatacaaaataactaaaaaacaggttgattttgcaattctacacaggtcaaaataggtacacaagcgaataaaaacgacttagcctgcgtctttctacttttagagtgcaactccctaaaagtactgtcttttatctcaacattaattttgtatgaaaataatattaaaaaacaccaacccacactttagaatcaacgaaaaacaaaaataataactaaaggatgagttgcggtggatacaataatcaagaaggactgaataaaaggttaataccagtacacttaattaagtgatcgattttgaggaaataaaaaacccgcaacaagtgcgggtttttttaaagaagttaaaaggctaattacttagcagcttttttctctttttctgcagcgattacagtttcagctacgttctgtggacatggtgcgtagtgtgagaactccatagagaactgaccacgaccagacgtgatagtacgtaagtgaccgatgtaaccgaacatttctgaaagtggtacttcacccttgatgcgaacgcccattgcgcctgcttcttggtctttgatcataccacgacgacggttaaggtcaccgattacgtcacccacgttgtcttctggagtgaacacgtcaactttcatgattggctcaagaagttgtgcgcccgctttagggatagactgacggaaagcgcctttagcagcgatttcgaacgcgattgctgatgagtcaactgcgtggaaagcaccgtcgaaaagttcaacttcaacgtctaacactgggaagccagctagaacaccttcttgcatcattgatgcgaagcctttctcaactgcaggccagaattccttaggaacgttaccaccaacaactgaagacgtgaatgtgaaacctgagttaggctcacctggcttgatgcggtaatcgatcttaccgaattgaccagaaccaccagattgtttcttgtgcgtgtagctatcttcgatttctttcgtgatagtttcacggtaagcaacctgaggttgaccaacgattaggtctacgccgtaagtacgcttaaggatatctactttgatatctaagtgaagctcacccatacctttaaggatggtttcgcctgaatcttcgtcagtttcaacttggaatgaaggatcttctgcaaccatcttaccgatcgcgatacccatcttctcgttaccgcctttgtctttaggagcaacagcgattgagataactggatcagggaagatcatcgcttcaagagtacattcgtgcttaggatcacatagagtgtgaccagtttgaacgttcttcataccaacaacagcgatgatgtcacccgcttgtgcttcagtaagctcagtacgctcgtcagcttgcatctcaaccatacggccgatacgctctgttttaccagttgcagagttaagtactgtatcaccttttttcatacgaccagcgtagatacggatgaacgtaagtgcaccgaaacggtcgtccatgatcttgaacgctaacgctttaagtggcgcatctgcatcaacagttgcaacttcaccagtaggctcacctgtttcaggatcagttagaggctgtggatcaacttctgtaggcgcaggtaggtaatctacaaccgcgtctagtactaattgcatacctttgtttttgaatgcagaaccacagaaagttgggaagaaagcaaggtcacgagtacctttacggatacacgctttgatttgctctagtgaaggcatttcaccttccatgtacgcttccattaggtcgtcgtcttgctcaacagcagactcaactaacatctcatggtactcttcaactttgtctaccatgtcagctggaacgtcttgtacttcgtagttttcaggaagacctgtctcgtcccaaacgtatgcttttttctcaagtacgtctacaacaccacagaattggtcttcgataccaattggtaaagtcataactagtgggttagcaccaagtactttttcaacttgaccaactacacggtagaagtcagcacccatacggtctagtttgtttacgaagattacacgtgcaacttctgattcgttcgcataacgccagttagtttctgactgtggctcaacaccaccagaaccacagaatacaccgataccaccgtctaatactttaagtgaacggtatacttctactgtgaagtcaacgtgtcccggagtatcgataacgtttaagcggtggcctttccactcacaagttacagctgctgattggattgtaataccgcgctcagcttcttgttccatgaagtcagtcgtagactcaccgtcgtgtacctcaccagtcttatgaattttacccgtaagcttaaggatacgctcagtggtggtagttttacccgcgtcaacgtgggcgaaaataccaatatttctgtacttcgataaatctgccattattttactcttaataaagtcgaaaaattattcggcgggagtatagcattacttaaagcgaacatcaccatcgaagtcgcttaaaatgcaatcaattttataaaatttttctatgctcaggataagcggcactttttatcgtgccgattaatgaatttatatgactaaaatcgttaattgaacggtaatttacccgataaatgatgcaattagctgtttgtcattttgtaacagcgctcgggtcggccaatacttccgtagctttgatcagcactgacttgctcagcctcaagcagatattccagataacgtcgggctgttgagcgactaacccccactaaatcacccatttgctgagcagtaaaagccgtgccaatattcgctttaaaagcctttaagatcttttgcaaagtgagctgatccaccccttttggtaacctaactggcgcttttaattgttcttgcgatccaaataaagtatcaaccattgactgggtaacttcatcagcacccaacaaacattgttgtctcgcttcaaatcttgccagcgcttgatctaagcgatttagcattaatggtttaaccaagaaatcacaggcaccaagctgcatagccttttcaagagtttctacttcttttgctgcagttaacagcattacttcgcttttcatttcttcgcggcgtagttcattgagtaaatcaagaccattgccatcaggtaaatgaatatctagcaaaattaaatcagcattaattgccgataacagtgctttcgctgtggcaagattgcctgcaatacccacaacctgatattgcccctgacgcagtgtttgccgtgccccttgttggccagcaacgccatgaggaagtaataagtattgcgccaataactgggcaacttctacttcgtcttcaacaatgacaaccgagtaagtcatgttctttaccttttatttataggctgatcgtttttattattttggaatgtagacacttaaacgtgcacccatgagatcagactcacctatttctaaactaccacgacacgaatctaagttggttttaaccaaataaaggccaataccatgttcagcccctgacttagagctgtattgtggtgtaaatactacatccttgtcatcgcctaaaccaaagccactgtcttcaacatcaaacaataatgttttactggtttcgtcaaccgtaacacgaaccttaggggtacgtgtatcactggctctaatagcagcttcaattgcgttatcaatcaaattgccaagtatcgagacaacccgctctagcatatctttacgggtgatcgatcctagtaagctgtctggattaagctcaaggattacattaagttcacgggctttgtggtatttaccgaccagtaaaccagctagcactggatcttggatcctttcgagtaagtgatggatctgcgcttgcgagcctttgctttcttgaccaattaactcaatggcctgctctgtttgccccatttgaattaacgcaccaattaagtttagcttgtttgagtaatcatgagtttgcactcgtaataactcagcaaaagcttgtactttggttaattgctgcgataaatattcaagctcatccgcagggcgcatactcagcaaaataccatcagcctcaccttgcacttgcaatgcatatcgcgacaacacaatgcgtttatcggcggcaaataattcaaaaccaacaatcggacgctgttggttatgcattaaaaattcagcatgttcaggaagcaaatcttcaagcttaagtggctgatggatacagctggtcggtttaccgaggatttcgcaagcgcgctggtttaagttacgtacgttaccttcaggatcgagggcgataatgccactacgaacggtattcaaaatagcatcttgctcagagaacaaccgtgctatttcgtcaggctgtaaaccaaaaatagcattacgtacccgttgaccgatatacaccgcagccaaaatacttaaaccaactaacaacaagccccaaagcatgatttcagcactacgagcacgaataagcggttcaattgattgcactaaaaagccaaccgaaaccaagccgataacttcgccctgctctgaaagcacgggtactttgccacggatagattcgcccaaactcccttttgcaatcgagacataccgctcaccacgtagcgccgctttactatcaccacccaccataggcttacccagcttgtcagagtcgggatgaacaatacggcgggtattcctatcaccgataacaataaagctcgctgcggtgagttcacgaatatgctctatttgcgtatttaactcatcaagcccttgcttggtttgtaatgcattttgcacgtcatctcgtgaggcaatgctggttgcgagcgaaagtgctttatcacccatgtggctatgcaagctttctgcagtgatctgatacaccaaagcgccaaacaacacagcttgcaaaacacatagaccggtaacccaaatgatgagtcgcgtttctaagcgcttaggttttttaaccatatgctgaaatgggtttagcttattggtgtatctcatatcagtgccttgttctacgcatgttgctctgcttgcgtagctgctttgtctttacgacgttggacaatatagtctttcagtgggaacaacaacactaagatcgaaatcacaaaaatactcagtgttaatgggcggtcccataaaaagctcagcgagccatctgaaatcatcattgcacggcggaagtttcgctcaatcatatcaccgagaataaagcccagtaataaaggcgccatcgggaaagctaataatcgaagcaccaaagccaccagcgcaaagcccaccatcataaataaatcaaaggtgttaaatgacactaaatacacaccaattaagctgaagaataaaatcattactgtcagcacagatttaggcattgccaacactttagcgaaatatgggatcaacggcagattcaaaatcagcagtacaatattgccaaagtacatactaacaatgacagcccaaaacacgcttgggttttcttgcattaacatagggcccggctgaataccgtaggcaattaatgcacctagcataatcgcagtcgtaccagagcctggaatacctaaagtcagtaatggtacaaatgagcccgtacaggcagcattattagcagactcaggtgccgctaagccacgcattgagcccttaccaaatttatctttcagtgcctttggagcaaggttacgttcagtagcataggccatgaagctggcaatggttgcccctgcgcccggtaacacaccgacaataaaaccaagtaaagatgagcgaccaaccacaggagccatgtcttttacttcttctttagtcagttttgttgaaccaatttttggcgtatcaggatcatcaatttttttatctggctcagcttcagggcgcgccacattaatcagtgcctcagccaacgcaaacgttgccattgccactaataaaaagctaatcccatctaataaatcagcttggccaaaggtaaagcgctcggtacctgaagagggatcaataccaaccgttgccagcattaaaccaaataccgtcatcatcatggcttttaaaaattgccctttattagagaatgcagcaatggccgttaagcctaaaaacatcagtacaacataatcaggcgattggaaacttaatgacactttcgctaataatggcgccgccaccatcagtaaaatggcgccaatcgtcccgcctataaaggatgaataagctgcaatagccagagctttacctgccttaccttgttttgctagcgggtaaccatcaaacgatgacgctactgtccccgccacacccggcgcattaatcaaaatagaagaagtagagccaccgaatatagccccgtagtaaacacccgccattaaaatcatgcccgaatcagcaccgatgctgtaagtgatcgggatcatcaacgcaatcgcagtaattggcccaagcccaggtagcataccgatgaacgtgccaacaaagcagccaacaatcacatataacaagttgttccagtcgagtacggtcgacaaacctaacataattccatcaagcataacttaactccacagattgccaggtactaagtaaatgcccagtacttgtgtcattaaaaaccaaaaaaccacggccacaggtacagaggcaaacaacaacaccttcttacggcgctcacccataataaaaaagccagcaattaaaaaggcactggtggcaattaaaaagccgaacggttcaagcatggcgctataagcaaccatcaacaccaacagtgcaaaggtacgtagtaagttgcccttactgagtagctctgctttttctgctggtgcttgctttaataagttggcaccaatcgagagtacacacaccacaataccgaataccgcatacacttttggtaaggttgctgaagtaacgctttcgtactcttcaaatggcataagtggaatttgccaagccacaagggcgtagagggtaaagaggaccaagaataaacttggtccaattagttcacggtttaacatcgtctaaccttagcctcggataaaaccaagttctttcattacaacgcgtaattgcgcttcttgctgctcaagcgatttaataaacgcttctttttcttgaaatagatttagccaaccattacgggcacgaaccgcttcccactctggggtttgctgcagctttcgtagcttttctgtgtactgggctagtttgtctgctggtaaatctggagttgcaaaaaagccgcgccagtttacgaattccatgtcgtaacctagcgactttaaggttggaattgctgggtaatctggcaatttatcggcagaagtaaccgctaaaatacgtgcctgaccaccatttgcgacttcgagtgcttcacttaagcctgttgaaagtaagttgacctcgcccgacaataaacctgccttcgctttaccaccggcatcataaggaatgtaacgtaatcgacggccatcaatacccgccgctttcaccgcttgtgctgccactaagtgatccatgctgccgcgcgcagagccacccgccacttttacagagcctgggtcttttttcatggcatcaataacgtcttgccatgttttaaatggcgagtcattgcgcacaacaaatgcaccataatcagcaatcatgctggcaactggcgttaaatcgcgatagctgtaaggaattttgcctgataatgcgcgcagaactataggtgttgagttaaccatcaacatatcgccttttttagtgcccgactcaatcaagtaagcaattgcacgaccaccgccgccgcccgacatattctgaaacgatgcattgtcttcaatgcccgctttcaccattgcttcgccgacaccacgtgctgtggtatcccaaccgccgcctgggccacccggtaccaaaaagtgtaagtttgccaatgccagtgggctggctactaataatgaagctgctaaaacagatctttttaatgatttaaacatagtcataatgcacgactcctaaaataagtactgcatacgagcgctgatgcccatacctgaatcttcatcaccaaccagcgtagaagcaccggtaccatcaacatcgctgtaaatcaggttgcccataaatttgatatcgctgcttaggtaataagatgtgcctaatgtataagtggtaacgtcggtaccttgctgtttgctgctggcattcatttgtgacacacgggcaacaagttcccatgcgtctttaatcccttttggttgtacaaataacgctgaacctgctttataacgacgctgctcaccgcctaagaagtaacttgccgaaacatgaaagccatcaaatcgctcaccatcaagttcattgctactatcaacagtatctaggtaacggctagcatattcagcctctagagtgaatgcattagcttggtaggcaaattcaagaccgctttgcgacatgctatcaagcgctgccgtttcaccaccgactgcgtaatccactaagcgaacattggtttcacgcacttcaccacgggcaaaacgagcacttaaatcattgccgcccatatcacgataagagtgccaagcacctaaatggataacatcacccggcgctgcacttgaccaggttaagcgacctgttacagccaatgtcagtttgtcattttcgtcatggcctgaagctccaaacgcatcgtttttgtaaacacccaccgcgtaacgtaagcctgagtctttaaagtattgagaagctgaaataccccagcggaagaaaggcgagaaggtattagcaagggtgctacgctcaatagtattaatgtgtttagaactggttagcgcattgagcgacatgtcttcacggatcttaccggcttttacttttaagccgttgtcgaatgcataacgtacccgcgctaacacgatttcagccgtgccttcagaaaattcgagtagtaatttgtgatcccagttgccatgttcactttcaacataagtacggatacggcgagggaagaagtcgctgcctccagcgccatcattgtcggcattgtaagcaccgtcgaaatagttgtaatcaagttgcacgcgaccaccaaattctaggttgaagccgctagatgtttttaatgaatccacttctttttgaagtgcatcgagttgttgctgtagttgttcagtgtcgctttgtgcgaatgctgatgtacttgctaacgccgctgcaacggctaaagcgagctgtgtgttacttgctttcatgaattactccacaccagattataattatttgttgtcattgatcggcctactgcaaatggcgatctggtttggagcatagtgttaacgatagattaacgaaatgtttagggggtaagttgcattgatggtgataaatggctttttgttcataaaactcatgaacaaaaagcacattactgggggttagtataaaatctaggcaaattagctgtttaaaagttgcaaaactagctaaaagtcatctcaggaatgtcaccagagacaataagtttgccctgtgtcttagcaataatctcatcaaccgagacacctggcgcacgctctaataaatgaaatgcaccgtctttgatttctaaaagtgccaaatcggtgatcactttattgatacaaccaacgcccgttaacggcaaactacattcggtcagcagttttgattcgccatgcttgttagcatgggtcatagtacaaataatgtttttagcaccggctactaaatccatcgcaccgcccatccctttaaccaactttttcgggatcatccaactggcaatgttgccgttttggtccacttcaaacgcacccagcacggttaaatcaacgtggccgccgcggatcatggcaaagctttctgcggagctaaatatagccgccccttttgctgcagtgaccgtttctttacctgcattgatcatatcggcatcaacttggtctacacttgggtatggccccataccgagtaaaccattttcagattgcagcatcacttcgatgccatcagggacataattagcgaccaaggttggaatacctatgcctaagttaacgtagtaaccatcctgtagttccatcgccacgcgtttagcgatttgttctcgtgataatgccatcagcgtgctccttattgattctcttgcttagtggtaactttctcgatgcgtttttcaaattcacctttaatcactcggtcaatatagatacccggcgtgtgaatttggcttggctctagctcccctggctcaacaatttcttcaacttcaagaaccgtaattttgcctgcggttgctgccatcggattaaagttcatcgccgtatgacgataaatacagttaccgtagcgatctgctttccacgctttaactatcgcaaagtcgccagtaatgcttggctctaataaataatcgcgaccattaatattgcgggtttctttaccgtcagccaccggggtacccacgccagttgcggtataaaatgcaggaatgcccgcaccgccagctcgcattttttcagctaaggtgccttgtggagtgagctcaacttcaagttcaccatttaatagttgctgctcaaatagcgcgttttcaccaacgtaagaagcaaccatcttgctgatttgcttgtcttcaagcagcacacctaaaccaaaaccatcaacaccacagttattcgataccacggttaaatctcgggtgccttgccgtttgatttgcgcaatcagcccttcaggaatgccgcataaaccaaaaccaccggctatcactgtcatgccatcttcaaggccagccatcgcttcgctataacttgtaactactttatcaaaacctgccattggctcctcctattgtgcagtccaaccgccatcaatggcgattgcttgggcggtaatattgcgagctgcatcggccattaaaaagctaacggtatgcaggatctcatctaagccgataaatgcttttttcggcatcggtgctagcataattgtttcgatcacttgttgctcagaaatgccatgttctttggcttgcgaggcaatttgttgctccacaagcggcgtttttacataggctgggcacacggtattaatcgtgatattggcatcgccagtttcgagtgccatggttttagcaaagccgattaagccatgttttgcagagatataagccgacttatatttagacgccaccatcgcatggattgaaccaatattaatgatgcgaccaaaatcttgctcacgcatgcgagggagtactgccttggtcatcatcgccgggccaaccagcataacttgctgtaagaactgccatttatcagccggaaaatcttcaagcttcgcaacgtgctgaatacccgcattattaataagtacatcaattggctgattaagctcaatgaaaaactgctctattgcattactatctgccacattaagtgcatacccttcagcgctgccgccttgttcaacaatgcctgctgccgcttgttgtgctgcttgctgatttaaatcagtcacaataatagtgtgaccttgcatcgccagttgctgtgcaacatataaaccaataccactggctgcaccggtaattaaaactgttttgctcatcgggctactcctctaaaaactcactgataagctgcgctttcggggcgattgagaaaattccatcaaggtgtccccaacccccttcaatttctgaaatctcaacgtctttacctgccgctctcatggtgtcaaacacggtgcgcatgttttcagggcgaagcagtaagtcgttcgttgcgggtagtaataatgttttggcagagacatttttaagtgccgttgttaaatcgctttgcataccagcggtaaataattgtgatgcccggaccaaataaagtacatggtttgcatcttgcgttttagctcgtgccattgcgcgctgagcgagtacttggtttaacttaggcaaggtacgaatatcttttaatgcaccttcatccaatacattaaagtcagggaagctcgcgttataaataattggatgcatcgcatcttgcgtaatattaagcatggttgccgctaagccatctaatgggcgctctttgccgtagtaattaccttgctgccaatttttatctaaacgaattggtaacgcccatttttcaagggccgcgactgtccatgcatccatagttgcagcgccaatcacatgaattaaacgctctactttatctgggtaacgtgttgcccactcaagtgcttgaaacgatcccattgatgcgcccatcacagcatgtaatttagtgatacctaggctgtcgagtaagcgcttttgcacattcacaaagtcagtaatcgtaaccacaggaaaatctaaaccataaggtttgcctgtttttggattagttgacgcagggcctgtagtaattacattttcatcatgccagttggcattcactaaagtatctgagctaatcacataatatttattggtatcgatagctttacctgggccgataatcgcatcccaataacccggtaaggcatcatccgctttatatttacctgcggcatgagaagtaccagagaagtaatgggttattaaaatcacgttatctttattggcgtttagttttccgtaactttcccaaccaatgtccacttgctctaaagtcacaccagacacagtggtaaaatcttttgtcgtaaaatgctgtttttccaccagcatggtgtcggctttgttggcagcgccaaacgcagtgctactaaatacaactagccatagcaaaattattaatttggttttcattgctgttccttaaaagaaaataaagagtccgagtgccaatgcgacaccgataagcggaataaccgcagtcagcgctgccattgaccaatacgctcgttgatgtgtttctttacagatagcgcgtattgttgtgaccacataaccattatgcggcaaggtatcgagggctccagaactaattgccactacacgatgcagctgttcagggtttacacccatgtctaaataacccggtgcgacaagtggtaatgcaatggcttgcccgcctgaagcagagcctgttaagccagcaattacactgaccgcaaccgcagcaccaaccaactcattacccggcatatgggtcatcacatcgacagcggcggtaaatgccggtgatactttcgccacagcgccgaaaccaaccacagcagcggtgttaccgattgctactaaagcgccagttgtaccaacattaatagcgttacccatatcgtgaaaatgcttaaaattgataatcacaatactcaacacaccaccaagcaaggcaacaataagcgctgtttgctgtagtacatcatgtagtgtaaatgataaaagtagcaccacgatcagcgggatcacacctgtaattgggtgcggacgacgacgctcaataatgacaggatcatcatcacgcgcttcaaaggtctcgccgttagcaacggcttttttgatcatcttgtttaaccaaaagtaacctgctgtcgccatgaaaatagccaccactaagctcacttcccatgctgcataaggtgacgtaccaaggtgtttaaccgggatccagttttgaatttctggcgagcctgccgaggtcatggtaaaggtcaccgaaccaaatgccagcgttgctggaataaagcggcgcggtaaatttgcatctttaaacagacttaatgccattgggtaaacagaaaacgcaacgataaagacgctcacgccaccgtaggttaaaactgcacaggcaatcacaaccgcaagaaccgcgtgcttcatacctagtttacccacaatgtagcttgcaacactgtctgcagcaccggtgtcttccataaacttaccgaataacgaacccagtaagaacataaagaaccacgcacttaagaagcctgcaaagccatccatataggcgttaataaagtttgtatctgccgatacagggaaaatggccatgccactactaagtgcaactaatagtgcacagattggcgcagcgataaataaatttaccccacgcagcgttaaaatgatcagcagtatcaaaccgcctaacagtcctatcatgctcagcatagacattcctataattattgttattacacagatgaggtgacatcggaataatgccttcagtcttaccctaagcgttcaaaaaatacataacactaaggtactatctgctttaaaaatagcttaattgcttgataaataaagggctgtggcgggtatagcactatggtactaattcaatttttgcaactatcttctacattaactgacaggtgacacgggcaaatcttattaagtcttcggcaacatcaatgtgagtggccataagactaatgacaacaataacaaggaatacaacatgataaagcttaacccaaaagtcgcgccacttactctggctgtatcacttgctttggcaggtgtcagtgctcaagcggcagaacaagccgaacctgcagcaaaaaaaggggaacttgaacgcattcaggtaacagcacgtaaaactgttgaaaacctgcaagaagttcctgtcgcagtcacttcagtgggtgctgaagaactggcagaaaacggcatcgtcgttatgaccgaagttcagcagttctcgccaaataccaccttgcaagcaagtcgtggtactaactctacaattactgcgtttattcgtggtgtaggtcagcaagatccactttggggttatgagccgggtgtaggtatctatattgatgatgtttatcttgctcgccctcaaggtgccgtacttgaccttcttgatgtgcaacaaatcgaagtattacgtggtccacaagggacgctttacggtaaaaataccattggtggtgcaattaaatacgtcaccaaagaaatgagcggtgatgcgacgttaaacattcaaggcactgtaggtagctataaccaaaaagatttaaaaattaccggccaattaccgattgttgacgaaaagctttacgtagggtttggttttgcaacgctaaatcgtgatggctttggtgagtttttaacatcggctcttgataaccaagaccgcgaaaactacaacaaagacgtaaccgcagctcgtgttaccttagagtacacaccgaccgatgatcttttcttccgcttagcgtgggataaaacagaagataaatctaacgcgaaaggcggctatcgtttactgcctagtctactaactgatgcgccagtgccaaacagcgtgtatgactcatacaccagcttgcctacatggaacaaagttgaacttgaaggctacagcctgactgcacgttgggatatgagtgatagcacaagtattaaatacataggttcaagccgcgaaagttactctccaacaaatatcgactttgacaatacctcgttgccaattttcgatgtaccggctatttacgatgatgagcaaaccactcacgagttacagctaaatcatcaaggggataactacaagcttgtatcaggcctttactattatgatggtgaatcatgtggtcaatttgaggctattttaggtatcttaggtcaaagcctaggtgcaccaggcctgactcgtgaagtaagcggttgtagtaactcaaacagtaaagcagcctatattcaaggctcgattgatttaaccgataaatggtcaatgacacttggcgcgcgttacaccaaagataaaaaagaagcacaggttaacaacggcctcatctttgacattgtttatccagagtcaggttgggtgccaggttacactcgaccagaaggccaacttgtaccaacggtactcgatgatgaagaagagtggtcacgtttcacaccgcgtgcaggtgttgaatatcaatattcaaacgacatcatgttctttgcaagttacgcgcaaggctttaagtcaggtactttcaacccacgtgcaactactgcagagccagcagcaaaaccagaaatcgttgattcattcgaaatcggtatgaagagtgagtggaacaacaacttacgtgcaaacgtaacgctattcacccttgatcataaagaccgtcaatatatttcggtattaccgggcgacagcgcagcagatctaaaccaacgcttaggtaacattggtgagtcaacatcagatggtattgagcttgagcttaactatgttgcaacagagtcactcagttttgatgcgtcagtaggttacatcgatagtagctttgataacgtaattgactacaacccagaaacgggtgaagcattcgataaatcagatcgctttagtgtatcaaacacacctgacttaacctttaatctgggtgcaacataccgtatgtacacagaaatgggtgactttgttatcaatggtaactactaccacagaggtgactacgcactattcgaagaagatagcctattaacgcaagatgcttacggtatctttaatatgggtatcacttggtacagcactgatggccactggactgctggtctttacggtaaaaacttaacggatgaagagtacatgattggtggttaccagttcgtagcgcctgatccaacagacccaacagataccagcaaatacaccccaggtttaggtggtgataatacgctgatcggttactacggcgaccctcgcactgtagccttcactgttggttaccgtttctaaaaaagaacctaaatccttgtgtgagaaaggtttgtctgaaacttcccttcaggcaaaccttgtttcaaaacgcaaaatcacttataacataacgcattggagaatcgagggaatgtctttagctgtgaacaccataatcgccgatgatcacccgttatttagaagtgcattgcgtcaagctgccgcgacatcagtgccagaagaacatatcaaagaaaccagtgacattgatggtttgtttgcactgttaagcgctcaccctgagattgaactgatatttttagacctcaccatccctggtgcaaatggcctacaagccctttcgcaactgcgtaaccactacccagatattttagtgattatggtctctgccaatgagacaccagccatcataaaacaagcaatgagtcttggtgctgcaggctacattcctaagtcatcttctttagatgtcatcagcgaagctattagtcatgtactcaacggcgacacttggttaccacctgaagtagatttaaccgatgtagtgatcaacgacgaacaaagtgaatttgctcgcaaccttgaaaaactaactccacagcaataccgcgtactcgcgatgattgccgacggtttattgaataaacaaatcgcctttgaaatgtcgattcaagaaaccacaatcaaacaacatgtgtcagcgattttacgtaaactcaatgtctataaccgcacccaggcaggcattttgtttaatcagctttcgcaagttggcaaaatcgaagaaagctaatttaagcaatcactcccagttttaatttgaaattcccataaatgggaattttaaaaccaagaaaaacaataaaagctattaacttcaataccttgaagattggcatactcctcgctttagtgctcacatcaaaaactatctaagtaaaaataatagatacaaatgaacactaaggacaacatcgtgtacacagcttgcaaaaaacttggcaaaaaattaatccttccaacgattactcttctatcgcttattttaagtgccttttctgcacatgcagatgagcttgaccaatggctggttgagttaatgcaaaaaagaaatattcccgggctacaacttgctgtcgttcgagataataaagtaattaaagttgccagctacggagttgcaaatattgaagataatatcgccgttgatgccgacactttatttgtgattaattccgcaactaaagccttcgttggtgtcgcactgatgcaacttgttgagcaaaagaagttagaccttaatgcacctattggcacttacctacccgagctgccaactcagtggcatgctataacaacaagagaattaatgagccatacatcaggtttacctgacatcataaaagatgaaattgccaatctaatctcagatcaaggacccgatgacgcatggcaacaagtacaaactaaaccattagagttcgaaaccggcacccgttttaaatataaccaaacaaactacgtcattattggtaagttaattaataagttatctgggatgccatttcagcaatttatagcaaaaaaccagttacaaaaaactgagatgaacagaacacttcaagcgggctttggcaatctcaacaatgttgtaaaacactcggctagacgatacgaaacacaaggtaatgaactaataaattcaagagaagccattttctcaccaatgctacaaaccgccgcaggtatggcctcaacagcaactgagctagcaaattggctagtggcattacaaacaaatcaatttattaatgcacaaagtattcaacaaatgtggaccccgactcgactaaaaaatggtcatactcaaggctttaatcagcgcttaaatggctacagtcttggttggcctgtaatgggacgagaagaacatccggcattagctgccataggtggtaacagagcaggtatctttgtttaccctgaagataatatgtcgatagtaatcttaaccaacttgattggcgcaatgccatcgcaatttgtagatgaaattgcgggcttttatatccctgaaatgaaacaagaaaatggctttggtttagcgaaaaatattaaacgcttatggcaagttcttgaagtgcaaggctatgaaaatgcaattacagctgcggatcaattagctaaagacgagcagatccaatttactgaaagcgatattaacttatggggttattcgcttattaaccaagacaaactcaatgaagcgttagcgatttttaaactaaatacgcacctttacccacatagttacaatacctttgatagcttagcagaggcatactggtacctcggtgatctcaagcaagcaaccgccaattataaccatgtgttaaagcttaaacctgataacacacatgctaaaaagcagctggctaagcttgcaaagttactacagtagactgcactttatatctgtcccacttttgattttattaatcccaaaagtgggaaaacccatctcaccgaaaaataacaaaacctttaaaatcaataaattaaaccttggcacgttcctcgcttttgtgttgctaaacctacaatacaatgaaatatagccaatggatttagacagcacactaaaacgcaaacctcagcaatcaaaagctaaaaaatggctttttggtgcagctattggcgtgtcagctcttggcgctttaatggtatatcaatgggctacacccaccgtggttgctgcaagccaactgcaaattgcaaccgtagaacaagccgattttgtggtgaaaatacgtggctttggtcgtttaaagccaaagtatcaacgctatttaaccaataccgacaccgcaatggtcgaagctatccatgtataccccggcactatcgttaaaaaagacacggtgattttaagcctcgtcaacccacagcaagcgcagcgtttatcggtcgctaggctagaacttgctcgccaaaaagccagtgttaatgagcaaagaattaatcagcaaagtgagctacttgagcgccaagcaaatctcgccattttaaaaagtgagctgcaaagcgcagagcttagagtcgatgccgaaagcaaactgatcgaacaaggaattgtttcaagcctcgattacaaacgaagcatactaaacgtagcacagcttacagagcgagtaagtatcgagcagcaacgccttgcacagcttaaagaaatgcacttacaacgcagcaaaatacagcaagaactattaagccaatttgagcttaattatcaggttgagcaacaagcttttgatcagctgcaaataacggcaggtatcgatggcatgctgcaagaattgaatgttgaacttggccaaaatctcgtgccgggtacccgccttgcggtggttggctcaaataaagcacttaaagcagagctaagcgtgaagcaagctgatgccgaaaaagtggcacttaatatggcagcaaaagtaaacacctttagtcaagcaagccacggtgaagttgatgccaaagtcacccgaattgaccctatcgttaccgatggtcgagttattatcgaacttgatttacaaggcacactgcctgccaatgcccgccccgatttaagcattgaaggctatgtggttagcaacattattcccgatgcattaaccattaacgtgccacaaaaagcacaagcaaatagcgaagccacgctgtttaaacttaatccagatacccagttagcaacgccaaccaatatcgaatttggtacactcagtgacaatcaaattcaacttttaagcggtgccaccgtgggcgaacagctgatcatttcagacctttctaaatggcagcatttggcaacaataaaaatcgaacaggacagtttatgaaaaccaatacgcttatctcattaaacaaaatcgccaaagtttatcgcggccaaaatgttgaaacctatgcattaaaagacatcagcctgaatattaaccaaggtgactatatctgtattagcggcccatctggctgtggtaaatcgacactgctgtcattattaggcctacttgatagcccaactgctggcgactatttcattaaagaagtcgacacaaaaaccctcgatatggatcagcaagctgaacttagaaaccttcatattggttttatatttcagtcgtttaacctaattgatgaattatcggtttttgacaacgtggcactgccgctcacttaccgagagccagccatgagccctagcgaaatagagcttgcagtaaaacaagcccttgatgaagttgaaatgggccaccgtgcccagcacaaacccaatcaattatccggtggtcagcaacagcgtattgccattgcccgcgcactggctggcaagccaagtattttattagtggacgagccaaccggtaacttagattcaaaaaatggtgatgccgtcatggacttgcttgatgagctgaataaaaaaggcaccaccatttgtatggtaacccatgacttacgttatgccggacgtgctaaaacgcaacttaaattgctagatggtgaaattgtttcctactcagaagctcgccaagcacctagcagcgacaccacagagcaagtactcgaaagcgccgaggtgatgtaatgaaattaaccaaaacacgcgcccaactgagcttagcgtgggcatcattaatgaatgcaccgggctttgtcactgcggttatcgcaacgcttgctttaacacttgccaccttgtttgtagtgcttagccttgttaacagctactttttaaagccccttgatgtgtacgatgaaagccgcatggtagtggttgagcaatcacttacttatgatgactacgatgccaccggctttcaaagctatcagtcgatggtgcattggcttaagcataatcaaagctttgaacaaagtatgatgatcaatgcgggtgagcaaatttttgcaaacctcgatggcgagccaaaagagcctgtgctgtatgttggcggcaactattttgacttattaaacacgccatttttaatgggacagggttttgaccttggagaaacgctagaaacacctgatgatcgggttgttatctctgctaacttctggcgcaagcattacaacagcgacccgaacattattggtaaaacactttcagtcatggcgggtgaaaccgattatgttcaccgtattgtcggtgttgttgatgattcattcagcccaccttacatgtttaaagcaagtgatgttgaagtatggtttccatcaagtgcggaccgccgtttctttcacaatgacgattggcaaagtccatggacaaacacttttaaaaacctaaaactgattgcagttttaaagcctggggtcaccatagatcaagttaaagtcgatttaaaacagcaaattgatacggttaaatcagagtggctaaacaatggtggtatcaccgatgtaaaacctgaagtaaccccctatcgtgacgttgagctgggtaataacgatgacttaagcttaatgatgttagccggtgcagtagggctactgattattgcggtacttaatgtaagcactttattcttctcgcgcgctcttgctcaacataaaaccctcgccttgcaggcagtgttaggcgctaaacgcagcacgttatttaaaagtatctttttacagtcactgattttaatgactttatcggtaagcatagcactgtttttatcggtatggggcatacgtttatttaaagtattagcagaaggacgattaccactggttaacagcttggcggttgatagcacgttggtcattgttgccatcatactatgtattgctcttgcttatattttctctgtaattacagcgcgtttggtaaattacaaaaccctaaatacgcaaatgcagaacagtggtaaaggcggagtttcgcaggtatcaggccgcacagtacggattttaattggctcacaaatgtttgttgccgcgctgcttgttagtttttctgtgatggtagtcagtaaagccatgggcacgataaaccgtccactcggtagtgataccgaaaacctgtattttgccaacctgttccagccaaataatcagatgtcattggctgagcgctacgaacatatgctgcaatataagcaggttttgcttgatagccaaggcattgatgatgttgcactgggtcacagccctgtttcgcaaagacaaaacgccaacaccctgacagatgtaaacggcaaaagctcagttttcttccctagtcagtgggtagggcctgattactttgcgttagttaataccaaaattctcgctggccgcacctttaccgagcaagctatacgcggtgaaactaacgagatactggtatcagtcagcgtggcagaaaacttattaccaggccaagactatcgaaatattatcggcaagagctaccaaggcttagaagaaaagatgtatgaagtggtgggtgtaaccgaagattttaatcaccctaaatactacgatgagtcgtttggtcgtcacatttggtggccagcgacaccatatagctacatgtttactattaaagctactgatggcgttaagctgactaataaacaaatacttaatacgctgaaagaaaagaacagcgacttaaccatgtggcagtttaacgacttacagcaagagtacgacaatttactgtatatgagccgtctgactgtggttctgtgtagtaccttagcgttatttactctattattagcagcaatcggtatttttggggtactgagctataaccttggtctgcgccgttatgagtttggtattcgcatggcattaggtgcgaaaaaagcgcgcttattcaagctgatgagtgttgaagccattattcctgtgctcattggctttgcagttgcgctcgctgcggtaatggtgggcttttacatgttacaagggcagctaatgtcgtggctggtgcttgatgtaagactgcaattactcgcttggagtattaccttatgtattgcgctatttgcttgctttagacctttggttttactacttaaagcaaaacctatggctgcactgcgtaacgattaacagcacaaatggtggcttaagtttaagccacctcaacaggataataagaaaacatcatggacaaaatcttagtcatagacgatcaagctgatgtacgtctggctgctattgttgcattacaacaactaggcttaccatgccttgaggccggaggccctgaacatgcgcttgagttattaaaaaccgagcacattagcctgattttgctcgatatgaactacaagctcgacactacctcaggtgaagagggattacgctttttaaagcaactaaatcaattaggttcaaccatacctgtcattgtaatgaccgcatgggctagcatagatgttgccgtaaaagccatgcaattaggggctgtcgactttgttgaaaaaccgtggaataacctacgcttaaccgccgttgtgcaacaacaactaaaacttaagcaaagtaatcacgacaacgcgtgcttaaaggcacttaccagtgactcacaagcacattacatagcccaatcagaaatcatgcagctgttactcgccaaagctgagcgcgctgcaaaaaccgatgccagtattttaattaccggcgaaaatggcacaggcaaaagcttattggcacattatattcatcagcattcactcagagctgataaacgctatgtaagcgtgaatgttggcgccattgccccaacgctattcgaaagcgaattatttggtcataagaaaggcgctttcactgatgccaaagaagaccgcttaggacggtttgaaattgccgaaggcggcaccttatttttagatgaaattgcaacgttaagcctcgagctacaaagtaaaatgctccgtgtgctagaaagcaaagaattcgaagtgctaggttcaagccaaaccaaaaccgccgatgttcgcattatttctgctaccaatagtgaattagcttcggccattgagcagggtgaattccgccgtgacttactatttagactcaataccattgaactgcacattccaccgcttcgcgacagaaaagacgacatcgctcccttagctgaacacttgttgttagtgcatggtaaaaaatatcaacgcgcaaatatggcgctcagtaatgatgccctaaaggcgctaaaaaattacagttggcctggtaatattcgtgagctaagccattgtattgaacgcgcggtgatcatgagcgataacaacaatattcaagccaatgacctcattttagatcaaccaagttgcgagcaaccgaatagcaatgccgaacaggctttgccactattgccccttgaagaacttgaaaaacaaatgattcaaaaagcgctgctgcaatttaatggcaatgttatcgccgcaggagaatttttaggattaagtaaatcggcgatttatcgtcgcattgataaacatcagctcgatttaaaagaagtagaacgctaaatgagtagcaagttgtcgttagagcagcgtattcgacgctatttttatatggttatagcgctgctattaacgcttggtattgccctttcgctcagcttaaaactagattggtttgccagtatcagtctattattgccgtttatcgggataagcgcttttgctttaattaaaagctaccgtgtgatcaccgatgtggttgaacgctttggtctgcaactagatgcactggcaaatgacgaaagtaatagttggcatttagcgtcttatcaaagtgggcgagtcgcagcacttaaacaagattttgccaagctcagcaataaaatagccaagaacaaacgccattacatgcaaacagaagagtttgtttttgagtttgccagcatgctggacttacccatcgttatcctagacccccatagcttgatttattttagtaataaggcgtttaaaaacagtattaaccatcaccagattgaaggtaaatcggccagcgacttaggcatcgccctgcatgatggcgagtggcaacaaaacagtgattcaccgtttaaacaacgctttcaaatctcatcgcagactttttggcggactggcagaaactttgaattactaaccttcttttcaattgagcaacagcttcgcgataatgaacaacttgtttggcaacggttaattcgagtgttaaatcatgaagtgcgtaactcactcacgccgatttattcaatgagtcagtcattgcaaactcttaaacgccaagggcaaattagcagtcacgatgatctcgcccaagatatgctgcaagtaatagaaaaacgcgctcagcacttgcttgattttgtggccagttacagtgcgtttgccaagctaccacccgcacaaaagcaggcaataagtagcgagcaattaaacacacgtttaagcgctatctttcctgaactagtgataaatagcagcgaagagttacattttaatgccgacctaggtcagctagaacaagcgttaatcaacttgataaaaaatgcctttgaagcaggtagcaactcagccccaaccctcacttggtcgagacaaggtaataacttaagtattgcaattagcgaccaaggttgtggtattcaaaaccccgataacttgttcgtgccattttactcaaccaaagcaaatggcacaggtatagggctggtgatcacccgagaacttgtgcgcaaccaaggttttgagttatcaataaactcaaaaccccagcaaggcacacaagctacaattactgtgactaagtcagtcgcttaatcatgcgttttaaggcgggcgctttcagaggcttataaagcaatggatagcccgcatcgagcactaactcgcgtatgccttcatcatgatttgcggtattaacgatagctggtaagcgtgttagtgcggcttgctcaattacttcaaggcctgttactccatcatccagctgataatcaataatcaacaattgcggcagggcttggcttgcctttagctgctcaagctccgctaagttagtggccgttgagatttcgcagccccagttctcaagtaactgttttaatgcctctaacacgttgcggtcgttatcaagcaaccaaatacgcaattgccccagctctgtttcttgtgatgcctctgcacctttggcttgcgctggtgcagcgctgactttacaaggtaaagtcagggtaaattgcgtacctttaccaagttcagatcccatcactagggggattttaagcaaatcacaaatacgtttggtaatagccagccctaaacctaagccttcagcacttggttttgcaccaagctgtttaaactcttggaaaatcgtttgctgatcattagcagcaataccaataccggtatcttcaacaataaacgacacatgattatcttcgtactgcatttttaagcgcacttcaccttgctcagtgtaacgaatcgcattactcaaaaggttacgcagtactcggcgtaatagcgctttgtcggtatgcaggcgcacatcgcaggtttcaacaataaatttcaaacctttttcacgcgctaaagcttcgtaatcattgcgaagtggttcaacaagagaactggttgcaaattcgctcatttgtactttaaacgagccagagtcaagtttggttaactctaaaatactcgataacaactcttctgcactgcccagtgaattttttatattcatcgccagctctttaagctcggtgtcttgggccttttcattcattaaagaacaaaataaactcgcggcattaaaaggctgtaataaatcgtggctggcagccgcaaaaaaccgggttttactgaccgttgcttgctctgccacttgctttgccatcgacaactcttggtttgcctgtgttagcgccaaggtgcgtgctgctaccttttcttcaaggctaacatttgcttcggttaacgctttttgttgttttacgaactcggtgatgtcggtataggttgttacaaagccgccacctggcagtggattaccttgcatttcaaacacgcgaccatcattgtgcgagcgctggtatttataagcactgccttggcgtaaataggctaagcgtttttcaacttcgctggtcatgctctcgccgctaaataagcctcgctcggcattaaaacgaataatgtcagcaactgggcggcctatgtagagcgcatcatctgggtaggcgaacatgtttttgtagccttgattccaggctaccagccgcagctcactatcaactacactgatcccttgttgaatgttttcgattgttgattgcagtaaatcacgattaaatttgagtacttggcttgcctcatctacaaattcagcaacctgctctagcggctgacgctgctcatctttggctacatctaaaataagccgcgccgatgcaccacctatcaccgctgacatctcgcgctcaaccagtagctctaactcaacattggcgggacgcttccacttacttttatcatcaggaaagtaatgattaaccaaagactgcgccgcttctttttcggcaaatcgctgcaaaagtgcacctaggtcgtgatagctcaagggctgcagatgattactcacccgtgaatcactcagctgcgatacaaacttattgctctgtaagcgttctgccaaggttgcacgactaaatagcggcactaaaaaatacactaaacagttcgcacctaacgacagcaacaaggcttggctgatactttccatgcctaaagaaaataaatcggtaggcgcgagccagctaattccccaaggcccatccacaagccataagctatcgcgacctaaacctccagcaatatttggcagtaagagtgtgtaaccccaaatgataaagccacttaaaatgcccaattgtgcaccgcgacaggatgcttgtcgccaccataagccaatgatcatggccggtgaaaattgtgcgactaaggtaaacgacattaaacccacattggcaagggttgtactttcgccaagaacccggtgagtaaaataactaagcaataaaatcagtacgataacgattttacgcgcatgtaataggttgtttttatcaagtccgcggctactcgatgtgagctgtgagcggcgtaaaataaattgattaataaagtcattggtgatcatcactgaaagcacaatggatgacacaatcaccatactggttgccgctgaaaagccgcctaaaaacgctaatagcgccacaaaggcatcatcagcagccataggtagcgccaatacaaaggtgtcgtaaccgacttcttgaccttgaaagtaaattaatccagcgtatgcaattggtagaataaacaggttgataagtaataagtaaatcgggaatagccaacgtgccgaggccaattctttatcgttatttttctcgataaagctcatgtggaactgccttggcaaacataaggtcgccaaaataccaagtaaagtatgggcaacatacacataggtcgggctttgtgtagcagccacttgctgatcaatatttagttcataggctttatcgtacagtgccacagggctatcaaatagcgcaaaacacacatacaaacccacagctaaaaatgccaataacttaaccacagattcaaaggcaatacttgcaataagaccggggttatgttcgctaggctttaagcgccttgcaccaaataaaatagcaaacagtgctaatacaagcgtgatataaaaagtactatcggcccatacttcatggctttgcatcattgaacggttagttaataaattaatactttgtgcggtagcacttagctgcaaagagatataaggcacaatggcaatcactgaaatcaatgaaatgagcccagataagctcgacgactgaccatatcgcgtagcaataaaatctgccatcgaggttattttttgctgcctacaaatatgcgctatacggcaatacacttgccaaccaaaaataaatagcaaaatagtgccggcataagtcggtgctagccaccagccattatatgcagcttgtgctgtggtaccaaaaaacgcccaagaggtgcagtaaactccaagcgataaaccataggttaagcctttaaaaggcaatacttttcttttatcagcccagcctgcaaccgcaaataaaattgccagatatacaattgcaagaaggcttattgaccaaattgagaacatcgtgtgtttttattttaattgttatagcaccagcatagtttttattgcgcgtaatttacagcctaactttagtgctaatgcattgtattgctgaagtttaaaaaacaaacacaaagaaatgagaattattttcaattgagtgttgacagacacgtaaatctaattgataatcactatcaacaagacagtaaagtgttatgacttgttcggaataaactgatttgtttctcgaccctgaaacacgtgtggcccacgataaagctaagatcgcctgttgctaatcgcaacgccccttgatattggcaacaggtgatcgccctactattttacttgctacattgctcatatcggtgacggtagatatgaaactaaaaaagcccttgcagggctttttttatgtctaaaagttaatgcgttaactttatcgacggttcttacgcgcacgcgctcggcgttgttttttctcttcttcttttgcggctttttttgcctctgcagcagcgcgaagctgtgcaaccatttgctcttcttcttcacgcatggccggtgtttccatggtaatacgaccaataatgccatcgcgtaattcgttaataagaatttcagacatcttgtaagtatcgatttgattaccaccgcggatacagccacgctttttacctgccatttcaacaaactcccagtcagactctggtagctcgtcaattttataacggctttttaaaagctctgggtatgcatgcagtaaatattcagcggtgtaactagccacttcttcgtaatcgatagcggtatcacgaattgcaccggttgctcctaaacgataacctgagttttcgttttctactttaggccacaacatgcccggcgtgtcgtaaagcataatgccatcgtcaagcttaatacgttgctgcgcttttgttaccgcaggctcattacctgtttttgccacaatacggccagctaaggtattaataagtgttgatttaccaacattgggaatacccatgatcatggctttaatttgtttatcagcacccactttatgcggcactaattttttacaaagttcattaatacggtgtacttcacccgctttatcattaccaaaatcaatcgctttcacgccactttgctgctcaaagtagtctttccaagcttgcgtcaacttaggatcagctaagtccgccttgttcatgattttgatcaccggtttatcgccacgaagcgcagtaaccattgggttttcactactgtaaggaatacgggcatcaagtacctcaatgatcacatccatctgtggcatgatttctttaatttcgttgcgggctttgttcatgtgacccgggaaccactgtattcctgctctactcattagattattaagctctttattttaaaggctaacgccatggggattttgctgataggtatagtttactacatcaagcaggattgtttaaaaataaaatcatgccttccatcaccacgaaagacgagcgactacatgcgctgtatctgcatgcagtgagaatgaccaaccattgcgctcacataagcgttgcacaatacctaaacctaagccgtagccgtgagaagctgtttcagtcgccgtatactgggtatcaccgccactgaactgattagtgattaataattcatgctctttaatcaaaattgcaatcggttcctgtcctgtaagggtatgctcaaacgcgtttcgcaccaggttattaaccgcaatagaaaatgcctgtgcatgcccataaattatgggattggcgagctcatcaagttcaacacctacgagcttaccgtttaacaaatagcgttgctgctctactgcttttcttaccagtggcattactaaaaactgctcatcatacaagccatcatcagtttcacgagcaagacacaaaaacatttcgatcattgtattcatgtcgtgtgttgcccgccttacacgatctagcaccttcatatcggcaggagtcaattggctttgttctaaaagctctagggcgccggtaatgactgtcactggcgtgcgcaattcatggcttgctgagtctgtaaaatagcgttctcttgcgatgaatgcactcactcgctcaaaagcctgctctattgtatttgcgagcatgccaacttcatcatttgtatatcggttagcatgtatacgcttgtactcttcgtttgataattgctcaggatcaatgtcggccacagctttagcaagttgagttacgggagccaaagctcgacgcatcacaacaattccaagcccaaagcctaataaccccaatgttcctacaaggctgctaataataagtaataaccaccaatcctctgacgaagaagcctcaatctgcgcgacatcaaacactacaaacccaggtgactgctcattgcctgtatcaattacggcaacatgtaattcttcgctatcaaattcatacaagcctactgctggatttgtttgcgcccacgcatgaagtgattgaggtaagttatctactttatcgtacgccttaagatttgtagtaatagcagggtagttatctgatgcaacttgcaattgctgggttagcacacgatcttcactcaatcttattgcagcaaagaaagcaaacccccatgcaatactgagcacagccacacacattgcaaatgcgatagcgacacgtttgtgcaaactatgccgatacattattgcacgtcctttgcaattcgatagccaatacggtgcacagtatgaatcaatggcgtatcaaatggtttatcaattgcctgtcttaacttgtacatgtgcgaacgaagcgcgtcaccatcgggaggctcatctgcccataataaagtttcgagactatcgcgtgtaacaacagaaggagatacctccattaaccgctgcaataacttcatacttgcaggattaagctcaataagctggcctgcacgatgtacttgcaaggtggacttattcatcgttagatcagacacagtcaataccttgttggtattgccgtgactccgcttataaagagcttgcaggcgcacatgtaactcttgcaatgcgaatggctttaccaaataatcgtcggctccgactgcaaaccctctcagtttatcatcaagcgtgtctctcgcagtgagcataagtacaggtgtttcaacgtcagcttcagctcgcaacttttgacaaaagtgtaagccatccatccctggaagcattaagtctaaaacaatgacatcaaacttgttgttcatcgctagttgcattgcacttataccgtcataagcaaagtccaagagataacagtgcctttctagatacgcagcaatattcgcactaatgtcacgattatcttcaacaatcaaagctctgatcggctcagtattcaaagcatctagcatttttcttccttaccaagcgtaatctaatcgcaatccgatcagcggttcagcttcgctatcgtcaacgacttcaattcctcggcggtaatcaaactcagtgtcatcagctgatgaagctgccgtgacatttataacatcaaggaaggcggtaacatcaataggaccaaaggcacgtcggtaatctacacgaacattcaatgagcctgatccttctttacggccaacattacgctctgtaatttccttagagtaacgcaaaggctgtcctggtcccaaaacatcttcatgtacaataaatatgtcatctggtctgccagaaaggtatttatatcgtccagcaagcttccaacggtcacttatctcccatgtcagccctaacgtggcaacatgttcacgactaaattcagcagctacgtcaccaaaaccatcctttcggtctacgaccgcatcattgtaagaataggttgcactggcgtaaagaccttcgaaaatagtagcattaagcacaaaatcagcaccatatgaagtaccatcaccatcatttgcataagttccactggtacggtctaggtcaaccactaagtcgctaagttgctgataataaacttccgttagtaatgaccagttggcattagggaaatatttaaaaccaacactcgtatgggtaattttttcagttttaagattattagtctcgttagctgcaagttctaaatatcgcggtgactgatgaaataaccccgccgttgcaaaataccttaccttttgacttggcatccagttgatgctgaatcgaggtgatataaaactttcatcagcaaacccatctcgttcaaatcgtaaacctgtaccaaaatcccaatcacccatttcaaaaatttgttctatgtagcctgtatagtttacttctttcaaagacgtgactgaattaaggctttcaggggttagtacaataaacttttgctgtgggtctggtctataatcgtcactatcataaacataccgattccattcaccatctaaaaaggtgctgtaatctagttcaatttgcgtaattcgggcaccgacgctcaacatccctaattgattctctacctcaaaatcacttctccaaccaatttctgtttcaccttcagatatagtgataatgtcttctcgaatagggtattcagaagctggcgttccctcgggcacaagatctggataagcctcaccttcagagctcaatttatcactttttcggtagtaaactttattagtcaaaacagcggtttcaccaagtaacgtggtcaatgttaaaccatacaagtcactatcttgctcggcattttgcaatgcagtatcttcaaaattaggtgattcagaaacatgctcaacgccacgagtatatttctcatgcgtatccatgagtaacacttcaaaagtgttattttgattaatgggtatcactgatttaaaaataatatcccttaaaacaggttcaccaatatctagctcttcgatagtttcaaacaaggcaccaaaatctaaccgccttgcagaaaaaagcatagttgcttcatcagtgatatttatagggccgtcataaccaacttcataaccagcaaggtcgtagcgaaaactggcagatgggctagggttaccatcggccacttctagcttcagtaaagaccctgcacgaccaccataagctgcttgccacccgccgggtgaaaattctgctccatttatcacattgggggcaaatatagaaaagcgaccaccgccgcctacatcttcctcttcacctaacgtcgcatcaaagtgaatagctttatcaaaaggaaaatcatcaacaaagagtaaattatctcttgggcctcgaccacgcacactaaaacttgcaaattcactgtcagatgcgacacctggcaatccatcaagagaaagtagtggatctgcacctcctcccacggcacttcgcagagattctctgtcgagataggtgctagagcctgaagtaaatgtatcagcttgttgggctcttacttcaactacttctatggcttgttctctaaggtcaaattcaaccttcgtatttttacgagttacaacgcgaatacttggttcgtataaagccgcaaagccactttttgtaatctttattgagtaaaggcccgggtcgagttgctcaacaacaatacgcccttgtagatcagtttgtaaggtttgtattgcagaggtttctcgttccttaagtatgacttgtgcgtttggaagtggtcgatctgtagtctgatttttaacaataaccgttattgcccctggctcttctactgcgtaagagtaaaatgccaaactactcaacaatagccatgcaaatgaccagagtatctgtctaaattgttctttcataattgcgtccctcttggcatcaaccatgatcttgatttcaataacttgcacatactttcatcctcccaaatagccctaattattgaattcgaattaatcaactttagacgttagcaaagtaaatgtgactaaaatgtcaccggcgtaatttaggtttataaatactgcttgtaataataaataaggattaatcaaaagtttcgctggagatatttaagcgtcggtaagattaattgcgctataatggcgcaaattttttcaagtaagcagttatggctcttaaatcaaccattattaaagcgcaattatcgctaagcgatatggaccgccacatttatcaagatttcaatttaacactggcacaacatccatcagaaaccgaacaacgcttgatgatccgcttgttagcttttgcacttaatgctcgtgaaggcttagagtttacgaaaggcttatgcgcagatgacgagccagagctttggcacattaactacagcgaagaaattgaattatggattgagctaggtttacctgatgaaaaacgtctgaaaaaagcctgcaataaagccaagcaagttgttttatatacttacggtgaaaataaccaagcaatttggtggcaaaaacatcaacctaagttgtatgattttaaaaacttgagtatttttagtctcgattatgctgctacccaagcactagcagagttagccgatcgcaatattaagctcaccatcacagttcaagatggcgaagtatgggttagctcagatacagcaaatatcgaaattaaaccgcaacagttaatgtaaggaatgcgatggcaattaggcaggttgtagtattacacggactttatatgtcgggctttgtgatgcgccctctgtgtgcgcgtctcgaaaagtcagggcttaaaatactcaatttgacctacaatacactctcccccgatagagcggcaattttcgataagattgatcgctttattaatggtaagccaaccgccttggtttgccattcaatgggggggttagtcgcccgcgcttaccttgaagccaattcactacaaagtcgccatgtcgaaaaggtaatcaccttaggcactccacataaaggcagccatattgctaagcaaatgcagcaaaaaggctttgaaatgctgttaaaaaacagtgtggaatttttattatcagagaatggagattggccgtttgatgccaagctttatagtattgctggcgacttaccaatagggctaatgccactgattgccaaaggcagtgtttctgatggtacggttttgatagatgaaaccaagctcaatggcatggcagagcataaggtgtttcatttgagtcacaccagtatgatctactcacgccaagtgatggattacattattaagcttataaatcaaagtgagtgatactttaatcttcagcacttgcggccactttgtatgaaattaatacaatgatccctaaaatcagtggtactggtgcagcaatgtaaccaaaggtatcaaagtttgcgaagctagcgcctgctaaatgacctactaaaccgataacaaatgcaagtaatgcaatcactacaacaactatttcagctttactttctttaactgttttaccgtccatttttattctcctggttaaatgcggtaaggtcattatgcgcttctatttcgttgcttttttgacctaaatcaagttctaaatcggcgtgtttatcagctaatacaaaccttgttttagatcatactttctgcttaatttttgcatatctgcaaaataaggtagattttttgctcagttgccccaagtctatataacaggtaattcaatgttatgttgatagtgcactagcgggtaaaaaccgcctttgatagctaaaacctatcacggtgttcgaattaaaccattttacagattaaccaagatggctaatacttaacaccaagcactagcaagtaaacaattaacggttttttaaggagcaatctatgtcacaggtaaatgcaattggtttaaacagcgcaaaaagtgaagacatcgtaaattcactaaactctttactaagctgctaccaaattcaatacatgaacgcacgtggttttcattggaatatcaaaggtcgaaacttttttgaattacaccttaaatttgaagaaatttataacttactacttgagaaagtagatgagattgcagagcgtattttaaccttaggtggtacacctgtgcatgcattctctgagtacattgaagcaagcaagatcagcgaagctaaaaatatcactgaaggtactgctgctgttgaaaatcttttagcgggttacagcacgcttattcagatgcagcgtgaaatcttagcgcaagcaggtgatgcggacgacgaaggtacagcatcattaatgggcgactacattaaagaacaagagaaacttgtttggatgttaaaagcttaccttggttaatgtttagaacagagactaaaaagccctcaattgagggcttttttactttaaccactttcttaaattttcgtactcgggccttgcttgaaaaagactctcggcatctgggtgaaaataaatatccatttctacccccgaccaaactacctctaacaaattgcgggcaatgatatttgctttaatataatcaacacgtttgtagccccgcgcttttacggcctgaaagtaagcctttgcaatctcaatactatcagccgtcgctaattcaaattgctccaaattcactaccgcatactgaattgattgttcagggtatttcatgatttcttgaccgacttcaatgctaaatgaagcaaccgcctctttgttaaagctgccgctcatttccacataaatcactggcggctcaacaaaatagcgccaatcaccatgggctttaaacatgcttacccctttgaaatacaacttaagtttacgcttataaacgttatttacttatttatctaagccttaattcggtaataaagcaataaaaaacgccatttctaatgccttttcttcaaggcttttaaaacgaccagatgcgccgccatggcctgcatccatatcggttttaaacaccaaaatgttgtcatcagttttaaattcacgcagttttgccacccacttcattggctcccagtattgcacttgagagtcatgaaagccggtagttacgagaatattagggtagtcctgcggcttaatattatcgtacggcgaatatgcctgaatcacatcataaaacgcagggtcatttggattgccccactcgtcatattcattcgtagtaagaggaatactctcatcaagcatagtggttagcacatctaaaaatggcacatgacaaccgatacctaaataaagctcaggagcttgatttactacagcccccatcagtaaccctccagcactaccaccagaggcaaatactttttctgggtgtgcatagcctagcgtagtaagagcacgcgtaacatcaataaagtcactaaagctgttttgtttatattgctttttaccttgttcataccagtgacggcctagcatttcgccaccacgaatatgcgcaatcacataaacaaagccacggtctagcaaacttaatgagctgcttgaaaagctaggatcgatggtaattccgtacgcaccatagccatattgcagtagtgggttagtgccatctttattaaatttatcaatacgataaaccaaagacaccggtactttttcgccatctcttgcggtgatcattaaacgctctgaacggtagttttgcgggtcaaactcgccgagtacttgctgttgctttaataaggttttgttcccggtttttaaatcgacatcatacaaagaacccggcgttgttaagctcgaatagtaaatgcgtgcagtgctcacattcggctctgggttcattgcaattgcggcataataacaaggatcatcaaactctaaagtaaggcgctgatcgtgctgattaactaccacaaaacgtgtttggccaagctctcgctcagtgaggataaggtagtcatcgaatatctcaaccccttctaacaacacgttttcgcgatgcggggtatgttcttgccaaagacttttatcgccaacggtactttgtgtcgcagtcattaagcgaaagtttttcgcttgccagttagtcacaatgtaaaaggtatcacctagcttatcgacatcgaactcatggccttcttcgcgtggcattaaagcgctaaacaccccctctgggttattagcatctagcacccaagtatcgtttgtttctgtggtcgcaaggtcaataatgataaggctttcatcgcggcttttgccaagccccatgaagaagcttttatcttgttcttcataaaccaatacgtcatcagcttgcgaggtgcctaaaacatggcggtaaacctgaaaacccaacaaagtttgtaagtcttttttcacataaaaaacggttttactgtcattagcccataccacttgaccttcggtgttttcgataacatcactaaacatctcaccattggcaatatttttaaaacgcacggtatatatacggcgaccttcggtgtcttctgagtaagcaagtagctgttcgtcagggctaatagccacttcgcccaactcataaaattcgtaatcgccggctaattgatttacatctaacaacaagtgcttatcgcgcgcttttattgagctgctgcgataatggcgcgcatattcatcatcgccacgtacttctgagtgataccaatactgaccatctttcacaggtaccgtgttgtcgtcttttacaatacggtcttttaactcattaaataattgttcgcgcagaggttttatgtctgctagttgcttgtcgcaataatcgttttcggcatttaggtgcgctaatacatcctcattttcacgctcatcatcacgcatccaataataattatcggtgcgagtctgttggtgagcagttaattgatgagggtgttttttggcaacaggtggatgcgctaataaagacaaagaatacgattttgatgacacagggaaaaaccaaagtaaaaaacgaattgctggcagtttatcacagaattataccaatcagcttaattaagcagtctattttgaggcaataaaacctcgttgataacaaggcaaaaatttcgttatttagttgttctaaatgagaaatttttaacgcagttagcgacaggtttaatccctcaaaatgattaagtattattgcgggttggtattaaaaaagcccactcaaattgagtgggctaagcaatgctaaaatagcatttagggggaaactgttaatgtgacacttgttgccacgccatagcccaacttttcccaactcccggttcaaagagtgggttatgtgaatctttaacacggcaaaactcactaaacggccatggcttgcacatgtaaatatgacccgttttaggttgaagtacttttacacctgcattgtaatcattgcatgcttgtgggtagacatagtcatactcgtttaatctatcttgtactcgctcttcacatttagcgatgcaattaaacgccacttttacatgcgttatacccgaaccttctagggcataaatttggtttgaacggtatgcaaccaccaaaccttgctctgtcattttgcccgctttaaccaacggaatatgcacattaatatgttcagccacagagcgaggccaattatgaggctctccatcatctgagctcacaattgcatattcgaatgataaatcgactagctctccttgcatgtcataaaaggtcactatcaccttatcaccaacaaaaagttgggtatgatgatttaagcaaccaattggcaaccatcttccagaggccattgacgtatgcataaacaaaatatcaccctaagagcaacgaataggtactatagtaacaatcgaacaaaatatttatgtaaagtttgaggcaaaagaaccaaagcacgtagattatgtgcttatcagcggtcccgctatcatagtcttaaaaccttagaccggaaactttgcgtcctaacctttcagttagtttgccaaaaacaaaatgagtataatcgcgaccagaaaacaaatcaaacaaaagaatgtaatcaaacattatatatagcaaatagttactatattttagtaacaaaaaagccaaccgtttggttggcttttaaatagctagtctgtactaattatgagctggctttgttctggtaaccactctataacctgcacggaagatattaagaacaccattgcccacatcactcatcacaatgtacaaacatggaacaagtactaatgtaattaaggttgcgaacattaccgcaaaaccaagtgctactgccattggaattacgaacttagcttgtaagctggtttcaaacataattggtaatacaccggcaaaggtcgtaattgaagtcagtgtgattgctctaaaacgtgcacaccctgcttctataactgcttcacgtgtagaaagcccttcgcgacgcgcttggtttacaaagtcagtcatgaccagtgagtcattgatcaccacccctgcagcagcgattaagccaaagcccgacattaaactaatgtctagaccaaaccataagtgaccccaaattgcaccggttaagctaaatggaataaccgacattacaatgagtggttgcgaatagctcttaagcggtactgcaagcaagatatacactaaaatcataccaccaatgaagaacataatttgctcattagcttgtgcttgctgctcttcaattgagccacctagctcagtttttactgatggatactcttctttaagttgcggtaaaagagtctctttaacttgcttaacaacttcacctggctcaatcgcttcttcatcgatactgccataaatatacacagttcgataacctccttcgcggcgaatatagctaatacctggcttttcagtcagctctacaacatcacctaatagtacttctttaccttcaggtgttgtaattactgcatgtttaagagatgcaaatgcttcacgtgtcagtttagggtaacgcaccattacgcgcacttcttcgccacggcgaataacacgttgcgcttcaccaccgtagaagcttgcgccaacttggtttgcgatattggcaagatctaaccctaaatcatatgccacaggttttaagcttaattgcacttctttgctcgccgggtcgatggttgagctaatatcaaataagcctttttgctgttgcagtaattgaataaagcgacgacctgcctcgttcaatgtatcgatgtcaggcccatacagtaagtaaccaaactcaccatccatgccgccaccattcacatcatcgtaaatttgtaatgatttgacaccggcaatacttggcatttgctcacgccagcgacgagataattcaaatgcgttgtatggacgaagatcttcatcaacaagtggcgctaaaagctgcgcttcagtacgcccttggttaaagactaaaatgtcacgaataagtttttgaccaaattcacgctcggtttctttatcaacattaaccaccatcgcttcaatttctcgaattgcgttaatggtttgaatatccgacgcattttcattcatttctaaacgaatttgcgggaaatcatgcggtacttttggggttggaacaacacgcacttgatttgatgaaatcaaaccaaacgtcataattaataagcccacaaaagaaaataaaacaagccagcgccattcaacacaacgtacgataaatgctttataaggaccatttacaaacttaaaaaagcgcttattaaaacgagcacgccagctgtttggattaataggcggaaatttagtgtgggcgatatgagcaggtaatataagcttcgactcaatcaaactgaatattagacacagaataaccaccaccgcgataccaaagaaaaatgcactttctggcccgcttgataatgtaaacggtgcaaacacagcaatcgtagtcaatacaccaaatgtagctggggtagcaacacgttttgcaccattcactacattgacaacaccaccgccttttttctcaatttcggtgtaggcgctttcccctatgactatggcatcgtcgaccacgatccccagcaccataatgaatgcaaataacgacacgatattaatactgataccaaataatggcatcatcatcattgcgcccaagaaacacacaggtaaaccaatcattacccaaagcgctaacttaaagcgtaagaagatagacaacataatggcaaccaagatagccccttgaattaggttggttttcatcatgtctaaccgtgcgttaaggtaataggtcatatccataagaggttcaagacgcaagcccgcaggcagctctttgtttttcttatcaatatacgctttcactgaatctgcaaccgggatcatgttttgttctttggttgcttttacagacaaataaaccgcattttcgccgttaaatttaaagtagcgttcaccttcaataaattgatctttaattacagcgatatcttgcaacaataccttcgcaccattagcccccaccttgactggaatttggcggaactcttcaccactgtaatattggttttcaacacgaacagagataatacctgcatcagtgcgtaattggccggcagagatgttggctgaataacgacgaacagcaccagcgacatcacttaacgttaagttgtattggcgcagtgagtctgggtcaatttcaatcgctatttcatctaacggcacatcgttttgcaccagcgatacgtttgataattgcagcaactcatcttcaatttgatttgctacaggctttaactctgtcagcggaatatcaccaacgagcgtcataccaatcacgtcttgacgaaattcaacctgactaatggtgacaggctccattcccgcagggaacgtggcaatactgtcgacgcgtaacttcactttgtcgagcacatcagtgagctcagcatctgtgtttatctcaagactggcacggccactatttcgaaacgagcggtaaacaccgcgcttaatttcggtaacatcttttagtgactcttcaattttgatcagaatactttcttcaatttcttgtggtgatgcacccggataattcgcctgcacctcaatatagttaatttcaacattcgggaacatctgacgctgaatagtgaaataactaatgatccccatgatgatgataaacaccatcattaagttagcagcgaccgagttattagcaaaataggctatcaggcctgactgcttttctgtgtttgtatcagtcatagtgttaccttaaagcttttcaaccgctgcagtttctgcatcgcttgtcatttctttcataccagcaatctttacttccatacccgcttgagggtactcaggtaaagtaagaacaagctggtcattcacttcaaggccatcactaatgtagaagtactcaccttcttcacgcactacagttacttttcgtggttcaagtttattctcatcatttacaatccacactgtttggttatttaccaaagactgcggtaaacgatagatattttgtaacatggcacctgcaaagttaacttgtacataagcaccaaatttaattggttgtacgtcatgctttaaaccgtatgggtcttcaacacgaaccactaagttactcatacgtgtcgcgttatctacaacgcctagatcgcggtcaatctctgcttcacgagtaaagctgtttaagcctttattgataatggtcgctttaacgccttttaagcgcttaggtaaaaacacgctgtcaaagccagcaattggtacaatgatttctgcactttcaatgttatttagctcagcaacctggctacctacatttatgtattgaccgacaccaatttcacggctgatcactaacgcatcgtaaggtgctctcacttcacaacgcgcaaggtcacgctcagcacgtttaagtgctgcttgcgctgatttaacagctgcttgcgcgcttaaaacttgaggtttacgtaagaataagtccgtgcgctcgcgctctggatagcgtcttgcctcatccaatgcaactttagcttgtgcttgctcttcaatcagagctgcttgagcacttgctaatgatgcttcagcttgaagtacagcggcttcgtagttgtctttctcgatagtgaataacacttcaccacgagcgacaattccaccgggtacaaagtttgggtgccaactggtcacttcgcctgcgacttgcgatgccaataatgtactttcaagtggcttcacttcaccgtagctattaataaccacttgatgatcatcgctggcaacaggttcaacttggacaagaggtcgaacatctaccacttccttgtcttttggttcttgggcaatagcattgatacccataaagccaataataccgaccgctaaagcaacgattggcaatatccattttagtaatctcgtgctcataacttacacctttaatattttaactgcccatatcataccaaagctgacagaaacattaatgtgacatttgtaagtaactgttacaaaacaggcaaaattggcaacaaatttaaaaaacgccaattaagaacaatttgttacaaacaaaagtaaaataatatcaaagaattacaaagcagcccttacacttgttaacaaataaccttttatcatgggtttatttcattaaactgatttgagaaataattaaaggaacaattagaatgaaaataacaaatattgctttggcattaagcctagcgcttgccatgaatggccatgctattgcagctaaaaaagaagaaaaaaagccagaaacacttgccgaaatgatcaaagataaaagtgaatatgctggtatctttactctctaccaagatgacaagaccggtaataacctaatggttatagaccaatctcagcttgatacaccctttgtatactttgcccacacagttgacggtgttacagatgcgggtcatttcagaggggcataccgtgaaacaaaattaattgaatttcgtaaatattttgaccgtattgatattgtaagtaaaactcctcgctacaaatttgacgaaaactcagcgcttgctcgcgctgccgatgccaacataagcgaagctgtacttgctagtattaaaattgaaaaagaagaaaacggcaaaatagcatttaacgttgataagctttttttaagtgaagcactgcataaggtatcaccttgggtaaatccaaaagataaagatgctagcaaacgctttaaacttggaaaattagacgacaaaaaatcacgcatcaccacgcaacgcccttacccaaataatctcgatgttgttgttgattacgtgtttactaatgccgagccaaaagtacgtggctcaagtgcagtaagcgatccacgtaatgtatcaattaaagtacaacactcatttgtcgcactgccaagcaacaactatcaaccacgtttagatgatgcacgaattggttatttcaccaatcaattcgataatatgacatctgcagactgggcaccgtatgaagatgtaatcaagcgctgggacctagagaaaaaagacccatcagccgcactttctgaaccagttaaaccaattacttggtggattgaaaatactacgccagttgagtggcgagatactattcgtgatgcagtattagcttggaacagctcatttgaaaaagcaggctttaaaaatgctatcgaagtaaaaatacaacctgatgacgctgattgggatgctggcgatattaactacaatgtattgcgctggactgcatcaccacgccctccatttggcggttatggccctgctcttgcgaacccattaaccggtgagatcttaggctctgacatcatgttagagtatgttttcatgaaaaaccgctggatgtacgacaccttatacacgcaaggtgcagcaacacttcaaagcagcccaagcacctcagaactgcattgttcactgggtcacagtattcaagaaaacatgatacttgctaaaggcttaggcacaggtgcaagcattgaagacaaagaaattttacgccaaggcttaactcaactggtgttacacgaagtaggtcatacccttggccttaaccacaatatgaaatcgtcaattttgtgggatgaaaaagaagttcacgataaaagtaaaacccaaggtatcgtaactggctcggtgatggattatgcaccagcaaacattgcccctattggcatgcagcaaggtgatatattccaaacaaaacctggcccttatgacgactgggcgattgaatacggctatagcccagctttagctgataaagatgccgaacaacagcgccttgaaaaaattctcgctcgttcatctgagcacgctttagcttttggtaatgatgctgatgacatgcgtgctccagggcgtcatatcgaccctcgtgtgatgattggcgatatgtcatctaaccctgccgcttatgctgatgatcgtatggagcttatcaataagctgtttactgagcttaaagacaaagccactgttgatggtgagtcataccaacaacttgttacctcagccaacattttatttagaagctaccgcacacaagctggcgtagtatctcgtcaaattggtggtgtttatgtagagcgaaatgtggtgggcgatgacaaaaatggcgcaccatttacgccagtgccacttgagcgtcagcaacatgcaatgcaaattttagctgacaaagtgttctcaccaaatgtgctttcaagcatgcagccaatttataactacctgctacaacaacgtcgtggttttaaccattatggtaaaaacgaagaccctaaaccacatggcatgattttaggcatgcaaaagctggtacttgctcagttattacacccggctgtcatgctgcgtatttcagatagcgctatgtatggcaacgagtattcacttaaccaatttatgaatgacttaacagcaagcatttttgtagacagcaaaaaagcaaataccttaagtcacaatctacaagttgaatatgtgaatcagctaatcgcgattgctggtttaggtaaagcgagtaagcacgacaacctagccaaagcagctgcgctttatcagttaaatcaaattgctgatatgagcgtgccatggggtgcagacaccgcagctaaagcgcataagcaatatatcgatcgcttaattagtaaagccctcgaagcataagcaaagcaacacaaaaaaggctgccaattggcagccttttgtttttaaagttaacgtctatcaatacacgacgagggtaatatgtcttttggcacagtcgttttattctcaccaaccgcttgcatgcccgttacaggtttatcaaaaccacaaagccaagcgatagggcttgttgggcttccgacaacaacggcagggcgaaaacttaacactgtattttgcaaaggcatcgatactttattacccaaactaatatgaatcgctccgtcttcaacagtgatccccgtaacccgattaccaattaaaaacttacttgcagggacacctgcttgctcattgttttttggaaagcggccgtgctccaaataaaaggttgtaacgtcttctcgaatagttgacgccatagctaagggatccgctagttcactgcgctgaatatattgactgtattgtggtaatgcaacagaagctaaaatgccgatgatggcgactacaaccattaactcaatcagcgtaaatcctttatttttcatactatctctcccattaagaatagaggctcatatgctcccattaagaaatgggcaattaatatcaccaataaaatactaaatgcagtaatgagtctgttgatatgcgctgtgatttcatcgcgtaggccttcaagtttattggcgacgaggagctctagctcttcggcaatatccaagccattactttgacatgtttttaaatgagataactcacgattatcgttctgtagtgttccatacaatggaaactcaattaacgcgactaaagcgtcataattgtgcctaatttgtttggggattattagccctaattgggctgatgaagcactcagtaaagtcagatttgcaaactgtcgaagcgcatttacagtcaatataataaccatcaagaacaagccgagcgcaatacttgctaccagccagaacctagctaaattagccatgtgctctgtaacttgcacatcaaattggctaaacacatttgagaacgaaggaataacaaattgctggtaaataaagttaacaaggatgaaaacggagaaaagtacacccagataaagcaacttggttttatagtcgaaagagtgctcttttagtgttgatgataacgctgcataacttaacgctaacctttgctgctgctcaccttcagcttctttaaggttttttgcaagcttagtggctaatggactattcttttgtccatcattataaatttctaagtgttgcggggcgctaagcgcttcttgctgtgctttatttaggccactcattggcgataataatcgacataaatagcctaattgattccaattcatatcttatcctttcgatagcgataagatactgtgccataaagcaacaagttaataaacggaatattacttagacatttaagccattgcagggcgcgatttataatactgaatacaccctagttgtgcagcattagtcagtaatatcattacaaaggtcagtatgtgagacacgctcggtgtcgccatagcaagctcggcagcgaggccgcagcttccagcaacaaattgcaggctaaagtagcgggcgcttaaattactaatatcaccgcttttaatggttttataagtctgcggcataacacgaatagagctcatgactaaccccacataggttaaccaattgagtactgttgcagtttcaagagatgggctaagtaataaagaaaaagggatcatcgacagcaatagcaatccaaccaattgtaaccgctgcgcacgagctgcgttatagcgagcaaagtagtaaaggatcagtgcgcttagcgtaccagtaacaataaatggtagtgccatataaaagcgctgaaaaaacagattataagtaatgaaatacacgctttgcgcaacaccaaagctcatcattaataacgaaacgcccgacacactgcgatttttacggattttatttaaaagcggataaaagctaaacgccaaaataaagcatgaaataaccggcaaaaaatgcgccaaaatagacctctctcgttacaatttagttaataagttagcaatttataaattagccataaaaacaaagtaaaccattgttttttatgcattttaaaagagcgcggcattgtaatgagagaacgctagaatgcaataaagaataaaaaacaaacaaccgcttgctggcaagatatccatacagggtgtttacaatcaatgacactttttaagcagcttgaatagttatggcaatatgggtacattgaacaaagagtgctcagcaggagaaagcaatgaaatcagttatatatgcattagtgttaagtgcttttttgattggctgtaaaagcactaaacaacaacttgctgcgccgcctagtgtcgcaagcttgatggccgcagagaaatttcaacaagtagaattacctgatcccgcgttatttactttacctgctgatgaacaaaaacgtttccttgattatttcacgcagcgccaaggtggctacttaagagacgatgaaattctttatcactacctagaaaataaactcactaactttaactattatagtgccacccttagtgcgcaagaggcattacgtaggcagcaaggtaattgtattagtctcgccattttaacccaagcttatgctcagcttgctgggcttaaaacaggctttcaggcggtgtcgagtgaaccggtttacagtaaacaaagcaacatagtgtatgtatcgggccattttcgaacaaaagtttacgcaccactaaatgaggacgagcattacttagtaaaaccaggcactgtcatcgattactttccagcgcgtggtagcttttactcaggccgtgccgatttaaaagacttaattagccgttattatagtaacctagcaagcgaggccttggctaaaaagcaattcaatttaagttacagctacattttaaaagctaacgaatacacaccacatgcaccctcactttataatttagccgcagttttacatcgccaatcgggtgatttagcgggcgcaaagcgaatttaccaaacagctatacactatgaccttgatgatactaatttactgcacaactacgcagtactcgccaagcaacttaatgatcctgaactagttgagcaaatcaactcacaactggctttgcttgagcaagatccgtttgaattgctagcaaccgcgattaacgctcgcaacaatggtaaatattacaaagcaaagcaacagattgaaaatgctattgcgttagccccgtacttatctgaaccctatattgaattagcaattattagttatcagcaaggcaataaacaacgcagtaaagagtggctagaaaaagccatagagatagaaaataaagacgaaaaactggcgctttatcacaccaagcttttcgctttatctgaaaaacactaagttataacgagtaataaaaacttagccatgctcgtaaatcattttcaaagtcgtcgccttctactcgggcgacgccaaagtcaatatttacatcattcaagcccgcaggccccataccaaaactaaaatctccctgccatttgagcccgtaactttgcgcatagactcggttatcaacctgatgctgttggtagtaaagccaaggcagtgaatctttgtaacttatgcccccgccataacctttatagcgctcacctagctggctaataaacggcagttctggagcaacaataaagccactttgcgtttcttgattaattaaatttgactcataaccacctaaagcaagtgcgctgtcatcgcgatattgctgagcgaaattaacataaacaggaatatcaaaggcataaccgcttaatacggtggcaaagttatagccctgccaattgtttgagtcagtatcaccggacaaccactgggcactcacagactgagcaaaaccataacgctgcctatcatgttgccatttttgttcaagtccaactgttaaccattgatcatccccttcactaaaatcactgtagttatagctgaggctcggtgtgatactaagttgttgaaactgcattgggtaactcatggcaaaatgtgccccagtgttacttaagtccagcgacgtttgagaatggtattgccttactgtttcaaggtcgtaatcaaataacaacgctttaaattttaaatcaaatttcgagtacttaaccgccgcgaataccccttccaatgctttatcatgtaaatcagcactatagcctgcttgtaaatcaagctgctttaaaaagtcactacttttaaccccaagggtaagaagtgaagatgaagctgaataatattgagatgccagcgaaaaagtcggcttttgctgccatacatcataattggctggctcagttgggctttgcgggtaaatcttcgcctcaggtaatacttcgctcgttacatctcctcgcggcggagctgcgcttttagcaaactcaacaacctctaatccgtgtggttgctcagcaaaatgcttaatgttaggcccttcagcagtgatcgataaatacaaaagttcaccattgttcattgccattgggtgtgcgacagcttcttgtccttgtgttaattggcttagtgaattactttgaagatcataatgatacaaatcgagagctttatttttacccgctacaaaataaagtcctttgccatcagcttgccagttgggctgtgatacatactgatagccttcaggcataggcacggcatgagactgctgaccatccaaatcttgtatatacaactgccaattagcattcaatgtcgcttttaaataagcaagctgagttttattagggcttaataatggatagtcataaaccgtttctaggcttttctcaaataaaggtgttgcgacacccgtattgagatcaaaccgcaccagctccgagaagccatgcttagcttgctcagcgtaaacagtttgtccgttatcactaattgtaaaacggcgcagccctgcatgatgcgtcaatgcactgacctctccggtctcgatatcataacggtataagtcagaaataccctgaattgcgcctttagcaacggttgtggtggcggtgaagaacagtgtattttcgtctaaccactgtgggttttttatgccctgtctattaatttgatgaagcacatgtttttgtttacgtttaaaaacacgcggtgctttatcagcaatatcagcagggtcatcatcgagtagcgcttgctgttctttcgcaaagtcatctgctgcctgttgattatcatcagtgctgtaaataactaaacgcgtttcgtcatctttgtttcgctcaacaatagcaagtttactgttatctaaacttaaaacagggttcgaggcgtataaatcaagttctaaccaaagcttacttgtaagtgcttgctcacttacttctttagccatagctttgtaggtatattcggcaataaaacgacgatagagtcgctctggtgagtcgccaaatacgccgctaaaggcctcatcaaaatcacgcgatttaaccgcttgcatgcgcgtccaaactgcatcaagagtttgcgctgaatagttctcttcaagccatgcaagaaagcgagaccccattaaatacgccatagaaccagctaaaaagcccccttcggtgctgcttagctggctataccgaggcagcgcaccttgctgtgcaaattcaaccagtattgcctctgaaaggttatcgtataaacgcccgcgaccagtcattttcgactcaagtaaggttgcatacccttcggcggcccagcgcggcatttcaccatcaactaaatcgtaaatatcccaactattgcgaatagcttggcgtaaatcgcttcgtgtaggctgagcaaggtgcactaaatgaatatattcgtgcaaaatcaatagttgctgccaaccatcagtattagaaatcacggtgtcagattgcggtggtgtagtaaacaaggccattaaaggcttgtttgtcaccggtagagcaaagccattcgaggcgttgaatgggtcgaaaaccaacacatcgacgacttcatcaagggcacggttttgctgttttaataccttatcgcggacaatttcaagttcggttgccgcggagcgggcccattgctggttctgcgtactaaaatgtacgttaaagtgttcggtatgaatagtttgccaagtctcttgacttgaagcgtggccagcggcaagtagcgccaacgttaatagggcttttttcatcacaatccttgattagcaagttgcttagttcaaggattagtatgcgtacattttttaagtgattgtagtaaaaaaatgtaagaaattaatctattttaattggcctaactaaaccgagcagttgatagattataaaaatagtcgcagcaaacattaaactacttcttagcgcacctaagccagccagcatcatggtcattgttaacaacaaagcgatgcctgtcacagcaaagctaacacacaacccggtgcactcttttttagagtgaacaaagtacaataaagcgacaacaccgaagatagctagagtaggtaaaaaataaatcattatgagcccagttacttaacactgcgctatcatacctaaaatcaacacaaaaataaagttattgagaattattttcatttaaaaccaactccgctcaacgccttctatttcatatagggcgaaatcagcaaactgctcagccagctctgcttttaagtaaggcattgatacagaagcagaagctagttgtatatacaaggttttcaactgcgatcttcgcattaagtaagtgcttgttgttgtaacactttgcgctttgtaaatttcaaaaacacgatattgaatacctaacatgcctgttttaaatacagcaaagaaacggccatcatgttcatacatcgccatacctgttttttgataacttaaaaacacaccaatcatcaacaacagagccactaaaatgctccaaagcatcatagtagcattaaataaagtattgaaaattaaagcagaaactatagttggcagtagcacgtataaaagtgtgtttttataaagtaaagctcgctctggctttataaagtgaagctctgttaaatcaacaaaccaaggaaataaccaacgacacacagtttgcacttgctctttagttaagactggcatcacaaaagtttgtttatttttatgtgccgcgaccccagcggctataccgccactacttacttgtgggcaaatcaaggtaaagcgattcagcaaacgcgcaataatattctgtttgatttgcacactttgaattttcaaaacactaatcgatagttgctgacgctcaaataaacctgccacacgcttaaacttatcgtcctgaaaataaagcttaaaattaaaaaatcgcactaaagccatcactacagacagtaaaatggcacataaaacaattgcaataaccatgattaacactgctattgcagcggcgctgccaacaaaagcagcttgctcattaagcatggcctcaaggcggtttatgatatttttttcgaggtactcaagaatcacattcataaatggagccagtgcggctaaggccaaaatcgccatgttcgacatcaaaccaaatttagcaatttcagcattgctaatcgttaaggtgtgcgacttgtcaacggcttcgctttgctcaataggcggctgttcttgttgttctaactgagccttaaacgccatcacttgttcgcgtacatgctcggcatagctaagctttactcccgggatcacagcttcttgagcgctacttccggcagcatcaaatatacaattaactaaattaaccggctgaaaataaaaaggttcggcaatatttacgttttgcactcgagcaaattttagggttaatcgctctttcttgaatacccctttattgagcagtatttcgttaccatccgttatgcgatatttaaaattacgataataagcaaaggcatatagcattaaaaatactgaagcgactgaagcggctacctgcccccaaaacattttttgctctacttgagtgacaaatagcaccaaaattggcaataagttcaaaaggccatctttgataaagcgcagtgcaaaatgaacaataaagtacagtattgcccatggcgagacacgttgccattgctgatcattcatcggcaaactcattatcttgagctgatgtgatatcaccataaccctgcacaaactggcgaacatcattgcattgttcgtcagttaacccgctaatatgcagatcagcactcatgccacccgcactgtaaagcctgagtgttgctaagcctagttttcgctcaattgggccgcgatgaatttcggtgtgctgcacgcgagaaataggcaatagggtaacttgttgccaaattaaacctcgtttaaatgcaatatcatgttcgcgtacagccacgcctttggcgcgcacactaaaatagttatagctcagggagattacgacaaggacaggtaaaatagctaaccaaggtgctgcaacagcctcggtcaaaccttgatttaagtgcctaaccacaataattgtgagcatcaatgggatgtaaaataatagccaatttatttgtacttgccagatagcattttctgcaagtggctgaaattgaatcgtttgatgctttggaagggtttctatttgttgattactaaacacggtaattccttgtaaaggccagcggtgccggccttacgtgctaacactgagtttttatatgttataaattatacccagcgtagttttgttgcaagtgtatggcttgcaccgggtgcaagctctactgcatcgtcaagtacattagcggcttctaggcacaacatcacgtgatattcgtcatcagcaaaatttgataaccgttttgatttctcgatccatggattccacagtacacacgatgttgaattttcgcggcctacttcaataatgccatctggcgtgatgatacgctgcgtatctttcgcttcggtgtaaaccatgtctgtttcacgtgcaaacgatacgagttcattttgctcaaatggcccttctgcaaattcgatgtatttcgcaccttgcagaccatctacttttgtttcttcgattgcaggcgttgggaaatatgtgtgtagtgcttgagtaaactttacggtttggttatctaagtttgtggttgttaaacgcagctctaaactagaggttaaaataaactcggctaatagcttagttttataaggccaatacttttcatcaatttgcgtcataggcaatgacaagctgatataaatagaatcgtcttgttcttttacttcttcagcacgccataaacttgtgcgagcaacaccatgcgcaggccagccttcatgttggcttacaccaaaccatggccaacaaatcggaataccacctcgcacacctttaccttcttggtaatcttctaattcagagacccataatagtggctttttatcggttggcgtgaactcagtaatttgtgcaccttgtaaaaaaatcgtcgctgtacaaaactcgcttgcaaccttaataaactcaagtccgctttcactttgctcaatcgtaactgatggcgataacttcataactcgtcccatttgatgaaagaaaaaccaaccttacccaatgcaaccgtcattagtaaataatatttagttatttacataaattgttttactacaaaaaggtaagtcactttataagtgcatgttaagtactaagaacatttactaaagttaattgactaaatttaaatttttattcttactctaaacaaataatccacctcaaaaccagcgatattaaacagtatttatagcttagatagccattatttatttgaactcaatttattagacatgtaatatttcgcgattgcggctgtgagcgtcgccaatttaagagacagaaacatgcaaaagtatgacgagctattagtgtcgttacgtaaggtgattagagctatcgacctacactctaaacaactcaataaaacatcagggttgaccggcccacaactactcattatgaacgaagttgcacaaaccgatggcattacggcaagtcgcattgcccagaatgtgaacttaagccctgcaaccgtgacaaatattttagaccgcattgagagccgagagctcattacgcgcgtgcgcagtcaacttgataaacgtcgtgtcagtttgtatttaaccgagcgcggaaaacagctgcttaatcaggctccgcagcccttacaagaacacttcatagagaaattcaccgcccttgaagagtgggagcaaagcttactactttcatctatgcaacgagtcgctgctatgatggatgctgatcagctcgatgcttcaccacttctagaagttggcgcaatcacaaagacgtttgaaccataaagaaaatttaaactagttgattaatattaattttatgtggctagtcttgggttcatcacaaatatcatctatgctttatagtaccgattccaatactagcgattattcatgcttaaactttcaaagttagcccttgctattgctttgggcactacttctagtcttagtcaggcatctgaaatcgatgaccttcaaaaacagttacagcttcttcagcaacaaatgcaacaacttcagcaaaagctagatgcagcagaagaaaagtcaaaacagcaagctgaaaagcaagagcaaattgatgcacaagtagcaaagcaacaaaagcaacttgagcagcaaacagctgctgtagcaacacctgagaaaaaatcaggtattaaagtgggtggcgctgtacgtaccaactttagtcatacatcttacaatgacggtaataaaaatcgtggtggcgacttcgactttgatattttcaggcttaattttgcaggtgatgttggtgatgtgcagctaaacgctgagatccgttttttcgattacatgaccgctgttaagtatgcctacgcagcctatgactttgccgaagattggcaggtgcaggcaggtattaccaaagtcccttttggtaactggccgtataattcacataactacttttttggtaccacttactatgttggtttagaagatgaccacgacttaggtgtactatttaaacgtaaactggccgataactggcaaattgatcttggctttttcaaaaatgatgagttaggtggcgttgacggttatgtaagcgacagaagtgaccgctactcttacgatgtagttggttttcgctcagccgaagaaggtgtatacgctgaaccaggcaatgctattggtgaatacaacactttctctggccgatatggctatcactttgaacatgacggtggcacaacagagcttggtgtctcagctctttctggcggactacatgatggtgaagataaagccggcgattactatgcctgggctgtgcacttaaacagcacaattggtccatggaatttccaactacagcatggtgagtataactacgatattgataacgtaaaccgcatggccgtgggtgcttatgccttttacgatagtatcgccgcagaagcgaccatgaccaatgccaatatcgcttatagccttccagtagaatggggtccggtaacgaacctgcagttttataatgactacggcattatttacgacaagtcagacaacagcgaagatacatggatgaacgtaaccggtgtatctgtcgctgcaggtggtttattcacttactttgattttgtacaagcgaaaaaccaaccatttgttggtggttcaattgctggcgacagcgacgagactgaaacccgcttcaatatcaatattggttattatttctaacaccaatacgcataagcaaggagctagtctccttgctttatctttactcgaaaacacacaacaattctacgctacttttagcgctctgtagttactagcaaacttcttacctcacgacccaagtgctgacagttctattcatgcaggtccgatctgtacctctagcaaaaacattttctagctatacaaatgaaaatcattattatatagcgccattctgagctaaatttattgataaaagctgtatagtagctatatcaaattagctcttagaaattatgggtatagaccctatgacaacatcaactaccccgtgcatttactttgaagacgttgcagaggaacatattcatgtcaatactcgagctactttctcgagctgaaaagctaaaacaagcgataaacaccatcacggatgatattgaccatcatctattagcactagcgcctagtgctgatttagataactataaaaagtttttaaccttacagtatgcctttcaatcagaattaaaaggtctatacgaacatgctggtttacatcagtatatagataacttgcatgatcgtacgcgattatctttaatcgagcaggatttaaacgatttaaaacacccgttaccaaatcataaatatcaaccctgtcgctttcaaaatgccgactttgcctatgtacttggttggctgtatgtagttgaagggtcgcaattttctgcaactacattaggtaaacaagttgaagctgagctaaagttaaataatcaacgtggtgcgcgctaccttgctaaagccagtaagtactctaaaggctgtcaactaagtcaccttattgataaccttgagctcagtgaacagcaacaggccaccttgatagaaggtgcagagcaagcactgcaacgatttaagttttatcaggtccaattttattgatgaatgtgagagcggcgtttaccgcctataaaaatggctgctatcaattactcgggttattgatggtgggtttaggtatcataggtattgcattacctgtgatgcctacaactatcttttttatactagcattggcgtgctttacccgctcatcacctaagctctctgcctggctgctaaaccaccctagatacggccagcctttaaggttttggcaagaatataaggtcgttcctactcgcgctaagttcttagcaggtttgggcatggctatcgggtatgtttttttactacaaagtgccgcgccaatttgggttatgtatttggtggcggtgattgaattaagcgttttagcctatttaattaaccgcccatcagcgccaaataaaccaaccctaattcaaactaaactgaccacacacacccgcttaatgttgcttgcttgttttcttagctcgcaacttgcggtaatggcttatcttgctattcatttctaacgcaaagaaatgtaaagaacgtaaacttgcttgttatcactaatgcaaatcattatcatatacgtataacaaacaaatacacctaattatgttttctttaaataaacgcagcttttatagtgtaagccgcgccttacatatatacctttcaactgccctattctttttacttattttattttgtgtcagcggcattattctgaatcacgttagttggctcgaaaatgataaacataatggtcagaaccaactacttgtttctgcggagttattcgaaaaagcacaagctaatctcgacacgttaccgagcctataccctgatatagaacagtacatgcagcagcaattttcactcagtaatgtaaaaagtattgagtgggaaaaagaagatgctttggtgatgctcgactacccgctgccagcaggctttgcttacgccgaaatcgattttcaaacgggcgaacttaatattgattatcaaaccggtggctttatgagcctgattggcgacctacacaaaggccgccatacaggtaaagcatggagctgggtcattgatatctcggctgttttgatgattctgtttgccatcaccggattaattattctctttcaaaaccgtaaaaaacgggccgcaggcctttggttaacgcttgttggtgttgccacgcctttggtcatttatctagtttgggtgcctcaacttaaaggagtatcttaatgaaacaagcccacttaatcgccgctctgttgatcagctgtttattcagcccactgagctttgcaaaagacgccaacctaaccgttgagttcaccttaccagagctagatgtttccccatatcatcgctcttacgtggcgctatggctagaaacacctgaacgtaaacacgttaccactattgcactttgggtcgaaaaagctgaatggtttaaagacttacgtcaatggtggcgaaaagccggccgtagcaacgacaacttcgatggtgtgacgggtgcaacaaaacgccctggtacttataccattgagtggcaaggaaaagatttaaaaggtaatccagttaaacctggtagctacctgcttaatgtcgaggttgttcgtgaagaaggtggccgagattacacccgcgttgaaatcgacttaacgaaagacggcaaagtcacaattaaaggcgaaaaagagttcgctactagctttgttaccattaccagtaattaaggacaaacaatgaaattaaaattattaaaaacagcgctgattggcgcagtgaccttcacagcaatcgcgtctggctatgcacaagcacatgcccgttggttaatgccatctcacacttctttatcaggtgagaaaactcactatgtgatgatcgatgccagtatttcaaatgagttgtttagcccagataaagcataccgcccgaaagaaaaaggcgcagagtacgacgacaacctattaattgcccttgctccagatggtaaaccggttgaagaaacaattcgcgcatactacttaaaacgcaaaaattcagcggcagtgactttatctcaagacggtacttaccatattgctatgcagcaaaaaccaatgctgatgactttctataaagacaaagacggtaatcgcggtcgtgtgtttgcaggtaaaaaagaagcagacctaccggcaggtgcaaccgacgtacgcactgtaaaatcaatcgcaacggttgatacttttgtaagccgaaatggcacttctaagccaacattgcttggtcagggcttagaaatttcaggcccaactcacccgaacgatctgtttgcaggtgaagaggctaagttccaattattaatggatggcaaaccagctgctgacgttgagcttgctattgttcgtggtagtgctcgctaccgtaatgagcgtgacgaagttaaagtaacaaccgataaaaaaggcttctttacggtgactttcgctcatgccgacatgtatctgattgaagcatctgttgatcaaaagccaacagaggcagatatcgataacgtacgctactcattattcacaacgcttgaagtggcgcctgaataatacgcttaattaggcctaaacgcggcctaattcgactttcgaggaagactgtagtcaacagtgtgatcgcagctaccgtctttctcgcaatcattaatcccatcaccatcgacatcccagcttgggtgcatgccttttagtgcactttttattaccgtgatatcggctgtaaagttactttgctcatcacgacgcgcggcattgcgcatcaaaaacacccgaatcacataatcgccattatcaggaattttaacctcggcatgatctccttttgccgggccaacaaacaaagcggttggattaccttttggtaaaatattaaagtagttactcgagtttgaaggagccaaatcaaccattaaggtattgcctttattaaggtttatttgatattccagcatctcataacctttaattgtgtctttaacttgccagctttgctgcaccgcaatatctgaagctaataactcataatgacggctatttggtaaattttgattagcaaacaccaagctgcttacagccaccgaaaaactaaaccctattaataacaacaacttcatattcaacctccttttaaattctcttttaaagaatgattgacactaattttacaatttttaattcttttaaagtgaacttatagttactccatcgcagacacactgcttaactaaacaggatacctactatgaaactttttactttaataacagcacaaccacaattacaaaatattagcactttattggcacgtattggtttatcggcgatctttttactaacaggctttagcaaaatagaattctttgatgcaacagcacagtacatggcatcagtaggtttaccagagttcttactgccgtttgtgattgcatttgagattgtgggcgggttatttattttactgggctttttaacacaactaaccgctgtcgcttttgctggtttcagcctagtcagtgctttgttattccactttcaacttgatgatcaaatgcaatttttaatgttctacaaaaacattgcaatggctggcggctttttagcattagcgagtgttggggcaggcaaaatcagcctagatcaactagtttcaaagcgtagtcaggcataatattaatcccagccaataccctaggttattggctgagtttatttttaagaggcgcgagcatggcaaaattattaacagcaaccagccacgatattggtgggctcgatgtaaaacgcatcttgccgcattttgacaagaaaatggtaggcccatttatcttttttgaccacatggggccgaatcactttcctcgcggtgaaggcataaatgtaaagcctcaccctcatattggcctgtcaacgctcacttatttatttacgggcagcatataccatcgcgattcgctaggtaatagcctgcaaatagaacccggcgatgttaactggatgacagcaggtcgcggtatagtgcactcagaaagagaaagccttgaggtgcgggcgagcgagcacgacatcaatggcctgcaatgctgggttgctttacctgagagtatgaccgaaatagcaccgcgctttgaacatatcaaaaaacagcaactacctgaaaaaatagaaaaaggcgtgttgatgcgacttatcgtgggtgatgcctatggcttaagctcgccggtgaaaagctactcgccgatgttttatgtagatacggtagccgcgcaaggtagccatataactaaaccgcaccctcatcacgaaaccgccgtgtatgttatttacggtgaaattagtattgctgatacgcgctatcgccaaggcgactttgtgctacttgatgacagcgaacacgaaataacgactctgctgcacagccgctttattttactcggaggcagtaaattcaataaagtcccttacttgcactggaactttgttgcttatagcaaagagcgtatcgagcaagcaaaacaagattggcaagcacagcgctttgcaagcattcccggtgatgagcttgagtatattgagttgcccactgctaaaaagtaaacttttccagcatttacaggtactattaagcagttaagtaagcaaaggaacatcatgctaagaattacgctagaacagtggcgcatgtttcgtgctgttgttgaatttggaggcttcaaccaagcctcacaaggcattcataaaagccaatcgagtattcataatgcggttggtaagattgaatctgcactcaatgtaaagttattcagtatccaaggccgtaaaacagtactcactgaatccggtgaaatgatactgcgccgtgccaattacttacttgatgaagctgcaaaagttgaggccataggtcaaaccttaggtgaaggtatcgaaagtaaattacgcattgctgttgatgctatttttccgcagcaattgctttataaagtgcttaacgatacttcgtcgcaatacccgcaactgcgtattgaactgcatgagtctgtgctgatggggggcaatgagctgctcgaaaacgatcaggttgatattgccattaccggctttccgatagcggcaaactttcacgaagaattatgcgatatcgaatttatcgctgtagctcacccagatcaccctttacatgcgatagagcgtgaaatcactctcgaagatttaaagtcacaccgccaaattgttgttcgcgactcagcaaaaaaacacaaacaagatggtggctggttaggtgccgatcagcgctggaccgttactcatatgcgcacttcgattgatatgatcagtaatggacttggctttgcatggctaccaaaaattgcgatagaaaagcaactcgctgctgggcaaatgaaagcgctcaatttaactcataacagtagtcgcagcgctaagttacatttgctctttaaagatggtgacaaactaggtccggcagcacgcgcatttcttggcgaattgcgttatcaagtgatggaaaacctatagttttagaggcgtttcagcaatacctttaacgcccggctcaagaataaacacgcccccactgtgcgggtaatcaacgagtactgagtcttctagccctaccgccgctgttgtcaccgcgagatgcgtgagctcctcgccgacaaatgcgacactcgtaacacgcggtgcgggcaagcgaataaactgcacctgctcaccacttggagcaaaacgataaatgccataaccattccatgcggcaacccaaagatgatcttcgctatcgacggtcatgccatcaggaaagcccatattgtcagtaaagcgaataaactcttgtttatcagcaagttcgccttgctcactcagagtgaagcggtagattgtttgtttatctgagtctgtagaatatagaaactggccatttttacttaccgcagggccattactaatagtgtagccatgatctaccgctgtcggagtctggccatgaccaaaacggtataacttgccactactgctttgctcttgagagtccattgagccaaaaaagccaaagccttggcgagacgttttgccatcgtttaagcgattttgtagcggttcgtgatctattgcataaactagctcgcggctaaagtcttcactatttagcttataaacacctttagcaaagcctgctactaattcgccttgctcggtttccatcacccagcaaataggttctggcatagtaaactggctaacgcgcattgattggcaatctaaacgaaacaaacgttgccctaaaatatcgacccaaaataaacagttatgcgccttggcaaaataggcaccttcgcctaattggcattggctagaaatgattactttaatggtgtcatcgagcataggcttcattacacaaactgctgaactatcctcattctatctgtgtatgaaaataagtgctaggccagataaaccagcaaccagtaagatgatgccgcgaatggccttttcattgaggttattgttgatcacaaacgacaagccccagccaattaaaattgccggtaagcagaaaaagaacaacttcacatcagccatatcggcagagcctgtaagcatcagtacaacaatgccaaacaagtttataaatacgaaaaaggcgcttaggttagctttaattttgtctttatcttcagcttgatagagcagccccattggcgcgccaccagcagaagtcgtggtgcctaaaaagcccgacgacatcgacgctagcaagcttgtaatggtggaaattttcggtttcatacctatgatagacaatgccaccaccaccaaaatactcaccccaagcaatagctgatactgcttcgcattgacatacaacatcacaatagcagcaaagataacccccacagctccaccaataatggatatgcctgtttgtttcatgtctatcgcgccacggtgtttaatcattaacaccgacgttaaaaacagcgcattcaaaatcattggtcccggcaccagctctggcattaaccagtaaagcactggcacacataacatgcctaaaccaaagccaataacactttgcaggcaagcgccaataatcagaattaaataaacaagcacaaagtcggtcaaactttcttaccaccttcctaactatgagatttcaaatgttttaaataattatttattattatagtatcatttgaattgtgtaaaattttttctttgctttaagttaatgcaactgacaatttagttaagtccaacctgcatccactatcagtgattgtgctgtcatcatgcaactatcatcagcggccaagaatagcgcggcattcactacatgatctggttgaattgtttcgttgatacactgacttaaacgaacatcttcaatcatttctggggttagccaatgagtaatttggcgctcagtcatcacccaccccggaaccagtgaattcacacgaatattatctttaccatatgaagcagccaatgaacgggttaaaccttcgatccccgctttggcagttgtataagccggcatacctgtttgcttaatacgccagctaaccgaccccatattaataatgctaccaccacctaaacgctgcatctgttcaaccacagcttgcgatgaaaagaaacacgggcgtaagttaacagcaaacttatcttcccaatatttcacatccatattttcagcggcatgacgggtgtcatcggctgcattattaattagcacaccaatgtcaccctgttgctgacgagtttgctcaatggccgcttttaaggcttctacatcacgaatatcgcaatggataaattgcgggtcaaactcatatttaccagctaatttcgcacataacgcatcgctttgctcggttgcaatatcaacaaaggtgactttcgcgccctgctcgcagaaccgcgttaccattacttcaccaattcccgatgcaccgccagtaataaacacactcttaccaacaaggcttgggtaaactgtttttagctcgtttgaatttggcatgataaccttttgttttaaagtaattacaacgtcaaaaagcgatacttattgagccgcttctttatcagcgatttctttttcaataaacgccattgcttcatcaatcatgtacgtcatcatgtttttagcacgctcaggatcgccgcttgcaatcgcgttatacactttaaagtgctcttcagcgatggccttcttattgcccttagcaggtgtagtatgttgaatactcacgtgtaatgcggtgctaataaaatcacgtaattgatagaagaaacggttaccactggcatgtaaaattgcagtgtggaaggcaagatctggctcatgcattacgccttctggctcttctgctgccgcttgcattttatcgagtgcaattttaatttctgcaatggctgcttggtcgcctcttcttgctgcaagtgctgctgcttgtggctcaatcgccaagcgcacttgtaagaattcttttagtacgtacagcgatgggctgctttctaacaaccattttaatacgcttgtatcgtataaattccagttatccgccgactcaacacgaataccttgtcgtggacgagaagaaatcagtccttttgctgcaagcattttcactgcttcacgaacagctgtgcggctaataccatacacttcacataattgtgcttcggttggtagccccgtttcagagttataatctccaacaataattgccttaccaagctcattggtaacttgttgtgataggtttaaattttctaagcgcgccatgtgtgttcctcaaaagatctgagtaatatgatacatctataaagctattccgtcatcctggaaataattgattaaaatcaataacaaacaaaaaatagcctaatacaagtgtctataaattgcgcaatcaagtcaccatttcaactacatagtgtcaccttattttaacaaatatctttcacttggcctatttataatataatatttttattagacaactaaaaaagcaaaaattctctttcaaaattaggtggaacacacgatggtcgaactaagtaccttagactgggcagtgctagcaggattttttgtcctgttacttggcgttgtcgtgatgtctatgcgacaaaaagaagaagacaccgctgattactttttagcgggtcgtaatgcaagttggttagtgattggtgcctctattttcgcatcaaacattggctcggaacatttagtgggcctttcaggttcaggtgcacaatcgggtatggcactggctcactgggaaatgcaatcgtggatcattctactactcggttggattttcgtgcctttttattggagtagtaaagtctacaccatgccagagttccttgagcgccgctttaactctaaatcacgtaccttcttatctgttatctcattgattagttatgtattaaccaaggttgcggtgacagtgtatgccggtggtatcgcgtttaaaacgatcttaggtattgagagtatttggggtatcgatttcttttggatttcagccattggccttgtggtgatcactggtatttatacggtacttggcggtatgaaagccatcatgtggacctcggtgttgcagacccctgtgctgattattggctccttagtcatattagttgttggtttagataaagtaggtggctgggcagaagttgagcgtatcaacgatgctaatatgcaccttattcgtagtgcttcagatgctgaattcccatggcctggcattgtgtttggttcattcattattggcttttggtattggtgtacagaccaatacatcgtacaacgtgttttatctgcaaaaggcattaaagaagcccgtcgtggtaccatgtttgccggttacttaaagctacttcctgtatttatcttcttagtaccgggcatgattgcatacgcattaaatgttaaaggtattattagctatgaaagtgctgaccaagccttcccaacgttagttgctgagctattacctgctggtgttaagggaattgtaattggtggtttagtagcggctcttatgagctctttagcatcattatttaactcatcagcgaccttgttcaccattgatttctataaaaaattcaaaccagaatcaactgagaagcaccttcttaaagtaggccgcattgccactatcgtgattgttgttttaggccttctatggatacccgtgatgagcttaattgccgatgttctttatgaatacttgcaaagtgtgcagtctcttattgcaccgggtattgctgcggtattcttactaggtttatgtagtaaacgcatcactccaacagcgggttttgtgggcttagtatcagggtttgtactgggtatgatccgcttagtgttactgccatttaaagatgatttaacaggttcatcgtttgcgtggatcaccacaatgaactggttatattactgtattctgctatttgtcgtggtcgttgcgattatgattgtggtaagtatgttcaccaaacaagcagacgaagaacaattgaaaggtcttactttctcaagcctagataaagcaactatgaaagaagtagctgccggcttagataagtgggattacattcataccgcgggtattattggtattactgcctttatttactaccgcttctggtaatcgttcgttcccaaagttgtagggcgccaattggcgcccttttttaatcagcgagttcaggtgaaaacactggaaaaccgtttttatcccacgtaataatacgtgctcgcgcatggcggttaggatctgtaagtggtgtgcctttgagctctttataatcacgactgtgataaatcattaaatcggttacaccatcttcagctttcacaaaactgttgtggccgggaccaaaacgacctagctcagcattggtggtgaacaccggctcagcctttttatgccagctagcagggtcaagtaagtcagcattcacatctgcccatagcaagcccattgcatatcgatgatcggtggcactggctgaataagtgacaaatattttatcgccatgggtgatgactgcagcaccttcgttcaccttatagccttgcacttcccaatcaagagttggctctgtaatcgcaataatcggttctttaattgatgttggtgagtccatttcagctaaccataaagctgagttataggttgcaggttggttctgctgcgcccaaatcatataacgcttacccttgtgcgtaaaacttgtggcatcaagcgaaaaactatcaagatggctggtgacttgccccatttcttgccactcaccttgcatcgggttagcactgtcgttcttaagtgcatacatgcgaatactaaacggcttttcgatatcacctgcggcaaagtagatataccaactgccatcaatctgatgtagctcaggggcccaaatattgacactcatagggcctttatcacgcttttgccaaataaccttcggctcagctaattttaaatcgtttaaacgacaagcttggcgcagctcaatttcatcaaatttcggcgaactacctataaacgtgtaacagccacttttatcatcgcgaactaaccaaggatcggcacgtttaagtacaatggggttatcaataggcgctaaagtcttgctactattagcatcagcaagggctgacaatgacgaggcgcttaacgcactaacaagcgttagccgagatatttttttgagcataatgtgtcctgtatttcgtctcgattttattgttaatattgtattacatattatatagtagctggatgaacacaagagttaaaacaacaaaaggtattcaagcatgagacccgtaagtaacgtgacacaagcgatgaagtggctttcaacagggctacttttttctgccgcagccgtatctgcaaagcaagttgaagtacacgacccagtgatggcgaaagaaggcgatacatattatgtatttagcacaggccctggtattacctattatgaatctaaagatttaaccaactggaaacttacaggccgggtatttaaagacgagcctagctgggcaaaacgcgtgtcacctaattttggtggccacttatgggcacccgatgtgtacgagaaaaatggtaagttttacctttattactcagtctctgcatttggcaaaaacacttcggcaattggtgtaacagttaacgaaactcttgacccatcgtcacctgattacaagtggattgactacggtattgtagtcgagtctgtgccagagcgtgacgattggaacgctatcgaccctgcgattattgaagatgataacggtacaccgtggatgagctttggttcgttttggggcggtttaaaactagtacaacttgatgatgacatggtgcgcttagcaaaacctgaaaaatggcaccacattgcgagtcgtccaaacacggaacatggtccgattgaagcaccttatatcttcaaaaagaatggctattattacctatttgtatcatttgataagtgctgccaaggggtaaaaagtacttacaatgtacgcgtaggtcgcagcaaaaacgttgaagggccatatttagatcagcaaggtcgatctatggttgatggcggtggtagcttagttattgaaggtaataaagattgggctgctcttggccacaatgctgcatacacctttgatggtaaagactatttagtattacacgcctacgaaacagccgacaacggcgtgcaaaagctacgtattttacctatgagctggaaaaacgattggccggttgttaaccccgccgacctaaataagctcaaaaccaagctcacaaagtaattattcaaaccaaaaaaacctgcaaattgcaggttttttatttactcaagcgagctagcttgaggctccagttagatattattaattaaaatcaaccaaggtaatatcaactagcatggggctttgacaaccttgctgatgctttttatcaataaatgagctgtacacatcgcgcgcaaggtgtgcagggattaaaacctcaaagcgactgcctttattcattaattgcaacgcttcttgcaagcccactatcgcctctgcaatttcgtactctacagcagcgccttgcttgcgagtgtcgaacaacacccgaccatttttaagggtaacccgttgatgtacagtcactgtggcatcccaactaggtttatccccctgaccttgctcaattactcgataaccaagccctgtcggtgttcggtaaaaactgtgttgctcagcgctattatctaaaagcgacggtaaaacatgctctttagccgtcgcaaacacattgttgcttaacatagccaactctttattgtgcgttaattaaacgaataccatagataccaccggcaacagagtctttgtcggcagcaaaacgtaaggtcagcgttttcgactttttcattgcttctgttaacgggtaatcaatggtgtagaactcatcagttggtttacctacaggcaaactaactgctgctaattgctcaccatttaaattaattgagaaatgacgattcacatcgccaataaaatagcgaacacgcaaagcaaccgctttttgttctgggttactaagctgatactcaaaccaacctgtcgcatcgcgccaatggtggccattattaacacctgcgcgggttccttcacctttaaagtcgtgttcaacttctggctgttgctcacccggtgtaatttgatccacggttaataaacgaagctgctctttcgcttgctcagccgcttttgcatcggcaacaaattgcgtgaactcagcttcgctttgctgcggccaatacacttgatagcgactatcgtgtaagcggaagaacggaattagctctgtgctcttagtgttatcgataccttgtttagcaatcgccacatttttatcggcgataaatgcgagctcttggcccggtttacgagtgagatcggcaataaatttttctggctcgctcagcataattggtagagcctctggcggacaagtcggccctgcagcaatgtggcccatgcggctattatcagcaacaaagttaagcttttcattggcaaatgcttgtactttggtggccattacaacaggtccgtacatcaccgaataataatgctgaccatcagggagctgctcagtataaagcttagggttaagctcaaaggcaagcttatcaccactttgccatgcatggctgatgctgtagtaaccgtctttttcggttgcgcttacagcctgtccatttaaagtaaagctcagctcaccttgctgccaagacggtttacgaatatgaattaccgactcagcactttgcccctcagacaaacgattcacggtcagtgaaaccttgttatcatctggaaattggctgtcttgcgtgatctgcaaaccctgctgttgccaatttaacgtgcttggaataaacaagttcacccatagctctttgccagtattgctataaatcagctcaccatatttgctgtgattttcaatacctgagcctacgcaacaccacattgaatcttgcactgaagaatacatacggtaatgaccaggacgcattgaggtaaagtaaacaagaccaccatgctctgggtgttgtgatgataaaatatggttatatgtggcgcgctcataatagtctaaatagcgcgtatcaccgctttttaaaaacaataacttacttagtttcatcatgttgtaagtgttgcaggtttcagggccttcaacatcttcaaccattggcgtgaagtcacttttatcatgaaaatgctcacgtactgagttaccgccaattgatactgagcgctcttggctgactgttttccagaaaaagtcagcaccttgctgccatgcttcatcatcgctggcatttgctactttcaacatgccaataatttttggaatttgcgtattggcatgcaggcccgttaacttatcttctttgtgtaataaaggttcgataatgatgttatgagaaaactggcgggctagctttaagtagcgctcatcatcactaataaagtacatgtcagcaaacacatcatttaagccaccatgctctgaatacagcatttgttgaacttgttcatcagttagctttgcagtggtcgctaagaaccattcgcctaacttaaatagcatttgtttggctttatcactaccggctacgtcatatgcatcacgcaagccatggaaaattttatcgatgttataaagcggtacccagcggtcatttaagctaaataagtcggctttgatttcacccttttcaatctgctgccacatttcatcgccatttggaataccacctaagtaaccacctgtggcttgttgggcgcgctccagctcgcttagcatataatctaaacgctgctttaattcttcgtcaccggtggctgcccacgcaagactcaaggcagaaaggtaatgaccaccaatatggccatcaaggccagtgctttcccagttgccatagttaggcgcttttggctcaaggccggcttcacgcaggtaaggagcaagcagctgatcaggatgaagagctaataaataacgcacattcgtttgctgcgcatgtaaaaacgggctggcgcttaaacttacttgatttagggcaaataaatgttgttcgctggtatgttcagcatgctccacagaagcggcttgtttactgtctgttggcagctcactgcaaccggtcacagttaatattgcagcgcaaacgcttgccaaatagctaactttgaatgtgttcatactgttgtctcccagcgaattgttattttaaagagcaaagcgcacacacttatttagtgtgtgcgtttaaagagtggttattttggtaggcgtttatgaataaccatatccgtatagtactcatcggtaattttgtattttttcaagatcagacctagcaaggcgtggaatacaccaggaatgatagttagcatcagtgctaagcccattagggtaaattcggtttgctcaacgttaggcttgtactcaaaaaatgccagtaataaaccacccgctaagcccgctaaaccgcccccggctttttggcagaatgaaataccaccaaacgatagacctgatgcacgaacgccgtctttaatttcaccgtaatcaacggcttcagcaatggcagaccagaacactggcgcatgtaaatcaaccacaaatgacaagatgatataaagcacaaacgccgtcattacatcgccaggctgcactacaaagtacattagtaatgaaataaatagcacggcaatttgtgattgacggaatagcttcattttacagtaacgctgggtgatccacgtacttgccaccattgagacaatagatgctgcaatacctgcactggtaaaggcacctgctaaatctggtacacctaagtaataggttgcgtaatacatagcaacactgccacgaatcgcatagccaagcgtaccaagcacacatgctgcacacagtagtaaccattggtcgtttttaataagtacttttaattgcgtaagtacgccttcggtttgtggctcatgggtaatacgttcgcgagtagtaaagaagcaaaacaaaaatagtgctacggcacatgccgataccaatgccattgccagtttataaccatacgacaagctgccatctccccaatatgaggcaagtagcggcactgaaaatacgatcactacattggcaatcttagcgaagaacatacggtaaccattagctgacaaacgctctttaggatcggcagttaatacaccaatgtaagagatataaggaatagcaacaccggtaaacatcaaggtcgcaaacaagtacgtggcataagcccaagctaacttcatgttgtagtcgaaatcaggcgtggtaaataacagtacgaccgataaaccataaggcacagataaaaataagaaccaatgccggaactgaccccaacgggttttcactttgtcggtgatcacccccattaatggatcggtaaaggcatcaacaaaacgcgccactaagaacaacacacccatatcaaccggatcaagtccgtagatatcggtgtaaaagaaagacataaaatagaataacgctgcaaccatgacatttactgccatgtcgccggcgccaaagccgaccttttctacaacggataacttttgagattccatacaacaacaccctaattggtcaataatgagccgccgctcactatttcaagcaatgctaaaaagctttcaacattgcgtatcaaataaatttatagccctagatattacacagcttggccattgcgttcgttatttttgtaaatttaatgctaatctaattaatagtattatcatacttattaaatcgcaactcttttcgaccgatggtttggtttataaaaaccaataaaaaaccccagctaagccggggtttttgggtctatttaagaaaattagaaagaataacgtgcaccaagtgcgaatgtacgtgagtagataccgttaccaaagttaaacaggttgtcgttaccttcaccatagtagttttgatatacgtcatctaggatgttcgttgcatcaaaagtaaccactaaatcatcattcacattgtagctaaattggaaatctaagctttgctcaggacgactccagaattgaatcgggttagcaaagattgccgcttcattacctgtgtagaactcagaacgccatacataagataagcgcatatcgaatgagtcacgctcgtagatacctacgatgctgtacgattcatcagaaacaccagccatttgtgaatcaacataaccagagatttcacctagctcattgaattcaggtgtatcttgctctgaatcaagcatcgtatagcttgcttgcacaccaaaaccgtttaagtactctggtaagttttctgggaagtaaactaaaccaacttctaaaccagatagttcaccgtttgaagcattcactggtgcacttaatacatatgggcgtgttacgccatcatcgccttcgcgcactacttgcttacgacccgcaacaactaagccttcaatttcacgcttaaagtaagctgcgtaaagtgaacttgtatctgcgaagtaccattcaagtgatacgtcatagttctttgattctgttggtttaagctctgggttaccacccgtaccagtaccgtatgtagcaccttctgttaatggatcgtaccagtattgcagcgcgtttaagtcagcaaagttaggcatacgtaatgtttctgtgtacgcgacacggcccactacatcatcagtgatattccagttaagtactaagcttggtagtaatgcgctgctatcagcacttgctgagctttcttcaaatacatttgagttcatgccgccagattcagcaataaagtccatatcttgctcgtagcttacataacgtaaaccaaactcaccgctgatatcttcagttaagaagaagttagttgtggcatatagcgcgtatgagttttcttcgatatcaaatgttttgtatacgtcttcagcttcaaggccgtatacgctacgaacagcatcaccgttatctagcatgtaaccaccgtcagcagttacaaagctgtcgaagacgtcagcacggccatcgaaataatcatcaacttggaacacaataccagaaccatcaccagatgccccagctgcagctaattgctcaattaagctagctacagatgtgtttgcaatgccagtatcttgaccacgcgtgtactcttgcgcagtacgtttttcgtaacggccaccgaatttcactttatcaaaataagtaccaccaattaggtattcagcatcaaatgtgaaggttaatgcgtcacccgcgttaccgccgccattgtcataaatagtacctgcattccagttttcgatagcagccatatctgcttcgtttaccgctgtgtttggatcatcccaaaacgcaatacctggtacgccgtctttatcgttaaagtctacatctaagccatatgcagtgcggtcaaaacgcattgcgaagaagtctgtttcgtactcactatcttggtaaacgacttctgtattaatggttaggtaatcgcttgcttgccactcggcacctagcgcatataagtagctatctgttttaccgtacgagtagtcaccactttggaaaccgccagcgccaatcgcttgcttttctttaaccacattagtgccatcaaacaccgttggagtttcaatgaagccgttaccgttttcgaatgtatttgagaaccacatcgcgttttgcgattcgttttcgtaacctgtgtagaagccttcagctgtgatttctagggtttcatctggtgcccactgtaaagagacagacgcagctggacgcttacgaagaccagtgaatgaagtaccaaaaatagcatcacgtgcaagtaggtattcagttggctcaccatttacgtctaaagtagaacctgccgcagtcggtagacctaactcagtgccttgagtccaaaattcatttggtacacgtgagtacggtgagtagttgtactgtggtttatcagtaaagaatgggaacgctgcacccgctgtgatggtgtcatcgcggtaatgtgtttcagcataagaaatattgaaaagtgcaccaaactcaccagcaccgtcgatttcccaacgattagaaagtaatgcactgatatttggatcaacttcatctggttgatctgagtaaatcgcacgtgccgctaaaacaactttttcaccttcgaagttgaaaggacggtgggttttaatatcaatcgcacctgcgataccacgttcaatttgatccgccgaacgggttttataaactgttacgcctgaaagtaaacttgcaggaatgtcttgcagcgccacatcacgacccgcacctgtaaagatagcgcggccattaactgtggtattaacatcagtaagaccacggattgaaaccgcacttacttcaccagcaccacggcctgttgtttgtacacctgtcacacgttgtagtgcttcaactacgttgttatcagggaatttaccaatatcttcagcaacaattgcatccacgatttgaacgcttgcacgtttttcatctagcgctttgtttaaactgccgcgaatacctgatacttgaataacctccatctcatcgacgttattctcaggagtgtttggtgcttcctcctgtgcaaaagcaaattgacaggtaaatgccataactacagcactggctatgtgtgttcttttaaacataagcggtgttctccaaattatagttatatcggtccgctgaactttccccattcagttaccgaagagtgaccactgcattgtgcatcgtgtgttgtcaaaacggtgcgcgagtgtgtctacattttattatgttaatacattgctgcctgaactttaatcatattgtatgattatttgacagtcaactcaaaaagccaaattaaaattagtgccattatgtttacaaaaaacgttgtaattataacacgttacaaactcaaaaagggctgcgcttttattttgggaatttatatagacccattattatcagtcacttagcgtttatttgtttgcttgtttaatttgtctttagttcatccagagcgacaaaaaaagggctaacaagttatttacccggcgtattttgatgctactatgataaaaatacaataatacaatatagagttattttttgctgcacttttactggtttgtttcgatgtaaacaatcagttactcagtataatcaggcatacactgtgtattatctggtcatttagagcgagctctaagtacaaaagctgcagttcgaacaacaattattagtcacagaggacactcatgaagaaattgaaagcgttggcgctaccattacttttttcgagcagcttagctgttgcacaaaacccattatttaccgatgtatttactgcagaccctgcggcacttgttcacaatgacaccgtatacctttatacaggccatgatgaagcccctaataatgacgtgttttttgaaatgcacgactggttagccttttcatcaacagatatggtgaactggaaaaaacacggcccaatcatgaaagcaacagactttaaatgggctaaaggtgaagcatgggcttcacacatgattgagcgtgatggcactttctatttctttaccacagttcgccacaacgatacaaaaccaggttttgcaattggtgttgcgacttctaaatcaccaacaggcccttttaaagatgcgattggtcacgcgcttgttactgatgatatgaccaagcacacgccaaatgattgggacgacatcgacccggctatttatacagaagaaaatggcgatacttacatgttctttggtaacctaatgccaaaatacgtaaagctgagcgacgacttactgtctcttgatggtgaaattaaaacgcttgatttaccaaactttaccgaagcgctatgggttcataagaaaaacgacaattactatgtttcgtacgcatgtgagttcccagagaagatctgttatgccatgagcaaaagcattcatggaccgtgggaatataaaggtatcttgaatgagatagccggtaacagcgaaaccaaccaccaatcaattatcgaatacaaaggtaaagactactttatttaccatacgggtgccgtaccaccgattgatggcaaaccaagtggcgggcgttttcgtcgttcagtggcgattgagccactttactacaacgaagatggcacacttaagcgcattatcatgaccactgaaggtctgagtaaacaagacaagtaatatcaaaaagggctctttaagagccctttttaatgctaaaatgtaatacaaataagcaaatttaacggaaaatccccactttcagataagcaaaaacttccctaatagcgcaaaaacagcgaaaaaaacgccaaaaatggcaacttgaaaaaattaaaatcacgctgtacatattgtaaacactgatacttcatatttacatatcaattacctttgcaaaagtatttgcacattttaaatagtactataaaattacaatactacgttcttattagtttgatataggcgcgcggcaattttattgacaacaatcgaataaaaaaatgaatcccagtttcaagaggacacataaaatgaaattaaataaattagccatggtcatagcctgctctttggctgtgacaggttgtggcaaagaagatggtactaagcttgacacagcaccagcggttgccgacccgcaaagtgcaaaaccgactgtaagcagcagtgttgaatacactgaatcaggtagtgtaatggttaccaatgtaagcgtgcacgatccttctgtcgttaaagtcgacgacacatattatattttcgggtcacaccttgctgccgctaaatcgactgatctcttgaactgggaaatgatttcgagtctttcagctaacgaagccgttaatgaaagcccattatttgattacaactacacaggtgaaattgccgaaggcattgaatggacagacggtttcacaggaaactgggctgctgatgttattcaggcgccaaatggcaagttctggttctactataatcattgtgcacaagataacccagatacaccagatgttgttgatgaagtatgctggaaccgctcttaccttggtttagctgaagctgacaatatcgaaggtccgtatacaaacaaaggtattttcttacgcagcggttatcgtacagaagctgagtttgcagcttacccacttgataatggccagacaacatggaatggtgccgttgatcctaacgccattgaccctgcagctttctatgatgctgatggcaaactttggatggtttacggctcatactctggcggtattttcgtgctagcaatggacgaagaaacaggtatgccagaagcaggtcaaggctatggtaaaaagctagttggcggtgacttccgtgcgatggaaggtgcatttgtcatgtacagcccagaaagtgaatactactacctattcttctctgttgctggttttgatcttaatggtggctacaacatccgtgttgctcgctcaaaaacaccggatggcccttatctagataacgcaggtaatgacattgcagctatcggcggtctggaggtcggcgaaaaactaatgggcggctttgagtacacgcaagaacttggcgaaacagcaccagcatggggctaccaatcaccgggccataactctgcttactacgatgaagcgacaggtcgtcatatcttagttacgcatacgcgtttcccgcaaacatcgactgagttcccaaccatttcagaagcgcaccaagttcgcgtacatgaaatgttcattaactcattaggttggcctatggcttctccacaacgttatgtgccgcttgaaggcgacaacatggttgtggcagatgagctttacggctattacaaatttatcaaccatggcaatgatgtaaatacagatgctattcgctcaatgcatattgctttaaacgaagatcactcagtaaccggtgatgatccaggtatctggtacatgattgatgactcaaatattaaacttgagttagattctggtacttactttggcgtggctaaatggcaatgggatgatgcaactaaagcaatggctgtcactgtatcagctacatcaagcgaaggcgctaccatttgggcaagtaaacgtgatgaaattacggatactgcaaacgtgctgggcactgttcaagaagcacttgatatcaaaactgaattatcaattgctgacgaaggctactcattaccaaccaaaggtaaagacggtgctgcaattaactgggaaagcagtgatgaatactacatcaccagtgaaggctcagtattcattccaacgccagatcgcggtgataaagcggttactttaacggctaatatctctttaaacggtgaaagcacgactaaaacatttaatgtaaatctagaagcgcgaccagagtttaaaaatgcgattgcacactatgcattcgaagattcgctaagtgatggtttaggtaaccttgatgatgcgggcgtaacagataataacatgttaaatgtgggtactggtacagctgcatacgcagaaggtcaaacaggtaaagcatttaactttgacggtgcaacgggcgtacgtttacctgatgagttagtaacaggcgatgagtacactatttcgtattggtttaagccaactgtactaactaactttacgcctacattcttcgcatcaacgtctgatgcacgttggatgagcttgatcccaggtagtacacactttacgtcaacaccaatgctatggagccgttatttagctgatgatggcactgatatgtggaaccaaatcatttctgactctccagcggtaatggattggaatcacattgcaatcacttatgctaatggcactgcaacactttatcgtgatggtgtacgtgcaggttcgatgcctcgccctgacttctttagcgaacaaacaggtaactttgcccttggtgtgaactacggttgggacttacctttccaaggtcaaattgatgaattcatcgtttatgactacgcgctaaacggcctagatattaatggtgcggctatcaataacctgacagatccgactaaatttgagagcttcattactgatgcgcttgatttaggtgatgtatcggcagtacgtgaaagctttgagttaccgcgtgtaggtccatttgtatctggtattagctggacgtcaaacaacgaagagtacttaaaaccggttaatggcacagctgttgttactcaacctagcgcctctgctggcgaccaagtagtgacattaactgcaactattaagtacaaagactttactgatactaagtcattcgatgtaaccttaaaatcacttgcacctgctgaatacagcttcgaaggtgacctaagtgcattaaacggtgcgtatgcagcgggtaaaccaacgggtggtttcatcaacaatactggtggtaacgtaacttttgttgacggtgtaattggtcaagcagtattcctagaaggttcaggtgttcgtttaccggataacttaatcacgaccaatgattactcagtatctatgtggttaaaacctgaaaccttcactgattacactacagcgttcttcgcaggtgcaagtgcaggctcttggttaagttatgtgccatctatggcaggtacaggcctaactcgtttatgggcaaataacggtgccttcttcgataatgcagaactagatagccgtattccagcaaaagaatggacacatgttgcattcactgttgatggtacgaatggtgatgtgttgaagatgtatgttaacggcgaattacagctagaaaccgatggcttcccgcgtgtattcacggttcctggtgaaacaaatgagtttgcactcggtgttaactactgggatacaccttataacggtgctatcgatgaactgaaaattttcaacggtgcgattagcgctgaagaaataaaagcactctttgatgcagctgctgcacaagagtaacaaagtgaggtgagctgcctcacctcaactatttgttgtctggaaaggccgggtgaaaacccggcttttttctaaagctttagtaccccttgccgatacatacatatcattcactttcatcgctctcattatggctattaactcattagcaagtgcgttaaatatctcaaacgcagatacagcagtcagtaataccaactcaaaagtaggctacaaactcagcagccaagagatgaataaactctcaggtcgtgaagtagagcccacgcaaaaagaagaaatatctagcgaactccctgcgcatatccgcaaaatggttgaacaactagaaaaactcaaagaacagcttgaacttgccaaagagcaattagccaaactgcaagcacttaaaaaccaagaagatgaagcggttaaagtgcaagttgaaacacagaccaaaatggtcatggaaatccatacgcaaataatgtctcttagccaatcaattagcgacgcgctaaaagaagcaggtataagcgatcccggtgtattgatgagtgtgttggtataaagttcagacctctggctttaaacagtattgattacgaccgctctttttagcttcgtacaggttttcgtcggcctttaagaaaagtgtcttccaatctcttggagattcaggaaccgtcaccccgccaattgaaatagttaagtagccacagggtgaaccttcatgaggtaaatgctcttcgtgcaataggtctattattcgttttgccaccaactgacagccttcatagttagtgtgtggaagaacaacagcaaactcctcaccaccccaacgtgaaataaaatcagtgtcgcgtgctaatgctcttttcacagtgttagtaactgatacaagcgctgcatcacctgccaaatggccataacggtcgttatattttttaaaataatcaatatccagtaataacacagagacttcgggtgactcgtaccttgcactcagttgattcatcaccacttctaaatagcgtcgattaaaaactttcgtgagcgagtcaatcattgatgcttctttagctttttttcgtaacgaattaagcgaactatccatataaagtttacccttgctggttcatcgttgagggtagtttgcattatcagggttttcaagtgacggcaaatagctaaggcccaacatttgggtagtatatttctggccaaagccaactttactcttgtaactctcccatcgctaactccctcttacctccctaaaaaggggcaaaatacagtgaaaatgcgggctctgaattatcgatcaagcaaatacgaaacttccttaaccattaaaaacacaatattttaagcgcctactttaaaaaataagcagtgaagaaacatagtttttatatttaaaaaacaaaagcatataatttaaaataaacctaaacacttcactctcagttaaaacgagcaaaaacacaaaataagaaataagcattaatacatcacttcaaaaaccctctcatagcacttttttagtatagaatttaaccaacccaaacgtaagatggctgcatcccatgaattaagtaaggtcattctatgcgtaacattttattagtttcagtaaatggatttacgtttaaagcatgtttattgattacatgtttatggatgagcttttttgctcaagcaaaagattcaacttcaattgaaacagcaagagcatggcttaagcttgttgatagcggcgaatacttgcagagttggcagcaaacagatcacatatttcagacagccacaccagagccaaaatggcgcttggcattagagcaacttcgtattccccttggtcgcgtaatgtctcgtacttattttgatgtacaagaatattcatcactacccggaatgcctaatggcgaatatttagtggttcaatttcaaacaagcttcaccaataaggagcatgccctagaaactctgagcctgagtaaaaatagtggccaatggcagcctttaggttatttaattaattaggggttatgaaggtgtggatggattatgttgggtttcgcttcgctctacccaacctacccaaaaatgaacagagcaagtgctgagaggtacgccacacataacaaccccaccgctcagcttggaactttactctcgctaacttacagtcttcagccacaaaaagccactcataaatgaagtggctttggttgagtcgattttttacttataacttaatttggttcacgcagatggaacacttggcacttattacctaaatcaggttgttgtgcgaagttagttttttcagctaaaccacagttacttaaaccaagtgcttgctttgtgtagcggttgatcagcataacaccaccgccttctactggagcaatacgccactgtgctgttttcgccgcacaagacgccatctctacgttggcacctggtactaaggcgttatcagctatcgcagcacagaactcgctgtcagcgctttgtttaaggcttacatagccagtatctgttggtgtgaagaaccattgctgtgcatctttatgcgtgtaagcttgttgctcaacattggtacctgctttaaccgtaccagccacgctaagtgctttaccactttgttggcttaatacgacaacactacccattgggcgtaattgccagtcaccacacgctgttgcgtcgctttgctgtaaaaccgcttggttttgtgcagcagaacaaccagcaatcgctaatggtttgcctgtgtaacggttagtaatagatacattaccatctgtgcttggtgctactttccattgctggcagaagttattgcgccatgctgcagattgcaccttagcgttatcggcatcattacagctttcaagctctaagaacttgctgtcttcacggttagctaaacgaacaaaaccatctgttgttgcatcaataacccattgaccattggtgcttgcgcactgacgttgtactgcacgtgcatcttgtggatcagctgcaatgtctaaacataagccgcttgttgcattcactaattggtagcgctgaccttgcactcgcgttaccagtgggccgtattcacctgatggcggtgcgacttcaacacctggtgttaatggtttaccaaagcttggtgtaccatcgtcgttccaagtaaatttttgcgcacgtaatgaacgagtcgcgctacaaccgtgctctaccgaatcattaccatgataaactaaccaatcttctgtgccgtctggcgacgtgaaaaagccgttatggcctgggccaaacacttcttctgtacgctcaaatactggcttgtcgtatttcttccagctgctcgcttttagcggatcgtcaccaacaagctcaagcatacctagtttgtaatcaggggtattacagaagcttgctgagtacgtcataaacgtacggccattgtgctgtaaaatttcagcgccttcagttactttacgaccactgatttcccaatctagctcaggacgcgtgatcaccgtatgtggtgagttcttcttcagagtccatgggttttccatttcagcaataatgtttaattgctgatcaccctgccattgtgagtagatcacatatagcttgtctttgtatgttagatagttaccgtcgatgttccatacgttaggcattaatgcgcccttgtattcgtatggacccataggatcatcaccggcactttctaatacgtttaagtgttggttatctaaagtgccatcagtaccggctgtgtacatcatgtaccaacggtagccgtttggtccttttaggcggtggaactcaaacgcccaaaagttacaacaacgctcagggtttgaatcagaccaaacattgacaggtgttgcatcagcaaggccagctagtgttggtgatttacgcatcactaactcagatgtccatgttgttgtagttaggtaatagttaccatcccaatactcaagccatggatcggcgccatttgggaaaagaggattagtaaaaataccatcatcttgaattggcgcttttgctgtggctgcgacatctgctttggctgtgttgtcttcagccgtagtctgacaaccagtcagtgcaccaaacgacaaggcaaataggctagctaaaccagccttttgcattgcgtttttaagctttgttgttttcacgtttgtgttcctttattttgtaccaaattcgtacacgatgcgtgttgaatacacgtcacctggcagtaatgttgtgcttgggaacgttggctgattaggtgcatcagggaaatgctgtggctctaaacaaaaaccacttctgaaattatgcactaagccagacgcttgctgagtactaccgtctaagaagttacctgaataaaactgtaccgcaggctcttctgtgtaaactgttaacgtacgaccagagtttgcttcgtaaaccgtcgcggcttcgataagcttattgcttggcgtgtctttaagcacaaagttatgatcataacctttaccaagtttcagttgttcgttgcttgctttgatatcttgaccaattgctttagcagtacggaagtcaaacggtgtgccagccacatccatcaactcaccagttgggatcaagccgccatcgacaggggtaattgcttttgcgttaatttgcatttggtgatcaagaatgtcgcctttacccgctaggttgaagtagctgtgttgcgtcatattgatgatggtaggcttgcttgttgtagcaataaactgcatatctagcgtattgttattcgttagcgtgtaagttacttcagtcgttacttcacccgggtaaccttggtcaccatcagggctcactaaacttaaagtaacgccagcgctgttttgcgtcgtgaacggtgtcatgttccatactttcttatcgaaaccttgcacaccaccatgtaaatggttgtcaccatcgttagtcgctaattggtattcagtgccgtttaaggtgaatttaccgtttgcgatacggttaccaaaacgaccgatgattgcaccgtagtaagttgtcgcttttgtgtatgcttctagattatctaaacccagtacaatattacccatttcgccttttgcatctggcgtttcaatacgcgtgataatgccgccgtaattgattacatcaacgctaataccattgctgttagtcagcgttacttgattaactggcgtttgatcagccagtacgccataggccgtcattgatgctgaaggggaagtagtcatattgtctccttgatgagcacacgctggtgtaagggcaatcccacatgtcaccaacaatgcataaagcccgcgcgactttttcgtgttcgaactggctgtttgatgagttgtttttaaaccttggaaaacacattgcaatgacatatgaataacctttttgtaattgtatttatagttttataatacaaataagggtgtcattgcaaatttaatcgctaaagttggattttgccgtctttcaccatgatgcaatccatccccgcacttttggcggcttggtaaccaatttgcgtgtcttcgaacactacgcatttacttggttcaacacctaaaagctctgctacttttaagaatgtttctgggttcggcttgcctttactaacatcactggcagtcactaaggcaccaattttattaattaaattagtatctgttagatgatcaattgcatgctcgcggtcagcccccgtgcccacacccataggcaatacaccatggtacttttcaagtactgcgacggtttcgtcaatcactagtggatgatgttgtaaatcaacccaaaactggtgtttatcttttgccacaaccaaggggtcatgatctaaaccaaatttttcgttaagcatttcaattgttttaacggtcggaatgccgcctaagctatacatgtagtcgtaatcgaatggatacccataggcttcgcaagctttctgccatgcctgtaagtgactgcccattgagtcaattaaggtgccatccatatcaaaaataatgccttggtaggcgcttaaatcgatcatatctactcctaaaaagtttcgcttcacaatagcataagccagcgaggagcaaggctcatcactggcttaatcgacaacaaaatttgacagggcatgctaaacacatgcccaagtactttaaatattcgttttacaggccacgttttagcatgtaataagctgcgttatgacgaagctctgttttgaaaccacggatcgtcgtatcgttatcgatgatcatcgtttcaacgccagccatttcagcaaaatcgataatcatatcggttgttactgcttggctgtatgcagtgtggtgtgcaccaccggcgtggatccatgcagctgatgctacagatagatttggttttggttcccaaagcgctgaagcaaccggtaagtgaggtaaatcagctggcggagccactgtatctacttcgttgattagaatacggaaacggttacccatatcaattggtgatacgttgattgcagcacccggttttgctgtaaacaataaacgacctacatcacatttcacgccgatagtgtgctggtgaacttcaagacgtggcttttgtgctgcaattgaaggacacacttctaacatgtgcgcgccaagtacttggtcagtctcacccatgttgtaagtgtaatcttccatgaatgaacaaccgccgtcacggccttcacccattactttcatgattcgaaccatagcagctgttttccagtcaccctcaccaccgtaaccatagcctttcgacattaggcgctgtgtagcaagacccggaagaccagaaagacctgataagtcttcaaaacagtttgtgaatgctttaaagccgcctttctctaagaaacgctccataccaagctctaaacgtgcttcgttgcgtagcattttcactgcgtaatcgtcttgtagagtttcgtcagcaattacgtagtcttgcttataaagctctaactgtgcatcaacttcttcttcagtgatagtatcaaccacttttacaagctcagcgacaccaaaggcgtgtacttcataaccaaaagtaatttgcgctgaaactttgttaccttcagtaactgcaacttgacgcatgttgtcgccaaaacgcgcaactttaagtgtttggctttctgcccaaccttttgccgcacgacaccagtcatctaactgctgttgtacgtcagcacgttgccagtgaccagcaacaactttacgctctttacgcattacagtaccgatgaaaccgaactcacggtcaccgtgtgcactttggtgcgtattcatgtagttcatgttgatgtcagaccaaggaagggctgcattgaactgagtatgaaggtgtaaccaaggcttacgtaattcgcttaggccagcaatccacattttcgcaggtgagaaagtgtgcatccataaaactaaaccaacacagttaggatccgtatttgccgcttggcaaacagcgtgaatttcttcaggtgacttaacagtaggcttacataccaagtttactggtaggttcgcttcgctgtttaagcccgctacaattgcttcgctgtctttggcaaccgtttctaacaccttaggaccataaagatgttgtgagccggtaacaaaccagacttctttcgtcatcgtcgtcatgttaataatcctctaaattcttgctatttgctctgaccgtaatacgcgtttttaccgtgcttacgtagataatgtttatccatcactgcttttttaagttcagctgcgtgtggatctaaagtgcgtgttaaatacgccatgcgtgcaatctcttcgagtagcgcggcatggtatacagactgagcggcatctttaccccacgtgaaaggcgcatgacccgcaacaatcaccataggtgcagctttcggatcgcggtcttgatacgcatcagtaatttgaataccggtttctaattcataatcgccattcacttgctcatcggttagctcacgagtacaggtgatatcaccgtgtacatagtcagcgtgagttgtgccaaggcaaggaatgctttgttttgcttgcgcccatgcagttgcataggtcgaatgcgtgtgtgttacacctccaattgaatcaaagtggcgatataaatgaacatgtgttttggtgtcagaagacggacgcatagacccttcaacaatgttgttttcaaggtcgacgatcaccatgtcgtcggctttcatttggtcgtaagatacaccacttggtttaatcgcaatcacgcctttgtcgcggtcgatttgcgatacgttaccaaaggtataaattactaagccacgacgttgcagctccatgttcgcttcatagacttcacgttttagttcagtaaaactcatgctttgtctccgtttacatagcttgcaagtgcttggtagttggcataaagctcgtcatacacagcaacgcgctcagggtttggtaaatattgatgacatacagacgacgccatcactttttgagcatctgccactgttgcgtgctcacccgcagcaaccgcagccataattgccgcacccaatgcacagctttgctcactttctaaaacgtcgattgggcagttccaaacatcagcacaagtttgcattacgtagtctgattttttagaaataccgccgataacaaccactgactcgattggtacgccttcgctacggaaacgctcagtgatagcacgtgcgccaaacgcagttgcttcaacaagtgctttgaagaacttaggtgcatcagtgcccatttttaagcctgttaatgccatggcaacgctttggtcagcatctggcgtacgacgaccatttacccaatcaagcgcagttacatcgttgcttgttacaggcagtgctgccgcagcttttgatagatcaactaagattgaatcttctagcttgttaactaacgcttgttcagcgtcagatagatttgtaagttggcgagttggccaaagtactaggtttttgaaccatgcgtataagtcaccgaatgcagattgaccggcttctaagccaattagcccagggatcactgagccatcaacttgaccacaaatacctttaacgcaggtatcacctagctgttctttagacgttactgtgatgtcacaagttgaagtacccattactttagttagaacgccagggcgaacattggctgctactgcgcccatgtgacagtcaaatgcaccgtaaccaatcacgataccttgtggtaaacctagcttctcggcccactcagcagttaagttgccagcaacttggtcgcttggctctgtcgttgcatttaacgtatcaacaacaccatctaatagtggatcgatattgctgaagaaactgtttggtgggaaaccaccccactgctcgttccacatttgtttgtggcccgttgcacaacgacctagctttaatgcttcagggtgtgttgtgccgcacattagcgcggtcatccaatcgcagtgctcaacccatgaataagtggctgctttaacactgctatcaacgcggaaaatatgtaatgctttggcccagtaccactcagaagagtagataccgcccatgtgtgaaaggtagttcacatcgttgttagttgcagcttcagtgatttcatttgcttctttaatagacgtatggtctttccacaaaatgaacattgcatttgggttttctgcaaattcttcagttaatgccagtggtgtaccttggctattaattgctacaggtgttgagcctgtcgtatcaaagctcatacccactactttgtctgcagtacctgctggaacttgtgaccaaagaccatttactacttctacaaggctatcaatatagtcttgtggatgctgacgaaactgatctttacttgggtcacaatataaaccttgtgcccagcgcgggtagtttactaaatggctggcaagttcttcaccagtcgcaacatcaacgagtaatgctcttaccgagtccgacccgtagtctaatcccaacgtataacgagacataattacctttcactaattgcttactaacattgttagtcattatctttatttgtatgataatatcaacaataccagattgtaaaggtattataaaaatattattaacaggattatttgctgctggcgggcgatttattgcgcagtttttctggaagattagattgttttttcagcacaaataataggttaaagccactacattaacttttgtatgataagaatgggaaaactatgtctagtcaattagaacaacttaaagcagtgacaaccgttgttgctgacacgggtgattttgaagcaatcaacgaatataaaccgcaagatgcaacaacgaacccatcactaatcttaaacgcgattcaaattgagaaatatcgcccacttgctgccgaagccgtatcatgggcaaaagcacaaagcagtgacgcagctgaagttgtaacaaaagcagctgacaagctagcggtattaattggctctaaattaatggagcaagtgccgggttttgtttcaacagaagtggatgcgcgtttatcatttgatactcaagcaaccattgataaagcacttgagcttgttgctctatataaagagcaaggtatcgacacatcgcgcgtgttaatcaaaattgcttcaacatgggaaggtattcaagcggctaaagtacttgaagcgcaaggtatccgttgtaacctaacgctggtatttgcatttgctcaagcacgcgcttgtgccgaagtaggtgcttacctaatttcaccattcgttggtcgtattcttgactggtacaaagcacaagatgcaagcgctgatttcgacggcgctaacgatccgggcgttaagtcagtcacgcatatctataactacttcaaaaagcacggctacgacacgattgtaatgggcgcaagcttccgtaacatcggtgaaatccaagaattagcaggttgtgaccgtttaactatcagccctaagttacttgctgaactagctgcaactgacgcacctttaactcaaaaactattaccagcaactgaaaaagcagaagcgccagcagccatgactgagcaagctttccgctgggaaatgaatgaagatgctatggcaactgaaaagctaagccaaggtattcgtcagttcgcaattgaccaagagaaactagagtcaatcttaagcgaattagtttaagccgattgtttaagcagcaaaaagcccgcaaaccaaggtttgcgggcttttttattgcatgccttttagtaaaagcaggcttatcgtgttgcgattacgataattttttaccagtcactttattcagcaagtaatgcgtttgcttttgcaactaggtttgccactgtgaaaccaaagtgttcaagcaatactgcaccaggcgctgactcaccaaatgtatccatacctagtacatcaccatcttggccaacatacttgaaccagaagtcacggtgtgcagcttcaacagcaatctttggtgtaccagctggtaacacgctttgacggtatgctttgtcttggctatcaaactgattcgttgatggcatagataccacgcgaacttgcttgccttgtgctgtcagttcagcggcagcattcacagctagctctacctcagaacccgttgcaattaggataagttcagctgtttgttcgctatcaacaagtacataacccccttttgcaatatcagcaacttgctgtgcatcacgtgccattgcttttgtaccctgacggctgaagatcagtgaacttggaccggtttcttttaataacgcttggcgccaagctaccgcagtttcagtttcatcacacggacgccatgcagtcatatttggtgtcatgcgaaggttagcgatttgctcgattggttggtgagttggaccatcttcaccttgaccgattgagtcatgggtatacacaaaaatgctctgcgctttcattaatgcagccatacgtactgcattacgtgcgtattccataaacattaagaaagttgcgccaaatggaatgaagccaccatgtaatgcaataccattcatgattgcgctcataccaaactcacgtacgccatagaatacgtagttaccatcagcagcatcttgtaaaccttttgcttctggccataaggttaagttagaaccggcaaggtcggcagagccacccattagctcaggaagctggttagcaaagaaggtgatcgcattttgtgatgctttacgtgtcgcaatgttttgcatgtcggcttggcatttagcaatgtactcatcagctaattcagcgaagttagctggtaatgctttttcaagaacacggcgtgtatattcttttgcaagttcagggtgtgctttgctataagctgcaaatttttgctgccatgcaccttcaagctcttggcctctcgcttgattattccactcgttataaacctcttgtggaacttcaaatgcagggtgcggccagtttagctgctcacgtactgcaacgatttcgtcgtgaccaagtggtgcaccgtgacagtcatggcttcctgatttatttggcgagccaaaaccaatcactgttttacaacaaattagtgttggttgcgtagtgttgctttgtgccgcttcaattgcacccgcaattgcattcatatcgtgaccatcaacatcacggataacttgccaaccgtaagcttcaaaacgtgcaggtgtatcgtcggtgaaccaaccttctacttcaccatcgatagagatgccattgtcatcccaaaatgcgattagcttgcctagacctaacgtacctgccagcgaacatgcttcgtgcgagataccttccattaaacagccatcacccataaagcagtaagtgaagtgatcaacaatatcaaactttggcttattgaattgcgctgctaaggttttttcagcgattgccataccaactgcgttagcaataccagaacctaatgggcccgtagttgtttctacacccggtgtgtaaccatattctgggtgacccggtgttttagagtgaagctgacggaattgcttaatatcttcgatgcttacgtcgtaaccgcttaaatgtaacaatgcatattgaagcattgaaccatggccatttgataacacaaagcggtcacggttagaccagtctgggtttaatgggttatggcggtgaaagttttgccacaataccgctgcaatatcagccatacccataggcgcacctgggtggccagagttagcttgttgaacggcatcgacagcaagtatgcgaatagcatttgcagattgagaactaggcagagtcatcttattagcttcctgttaatattataatataattaatatcgcaaaaactcacccaaatagcaacttaataaaccgccagcccccgtataaacaggagctagcaacctattatttgttaattataaatactttaaccaaggcttgttagccttacgcttgtattcactaaacttcttggttggccaataaagccctactgccaacaacaaagtaataaaccaaatacctgatatatcactgactcctaaatattgcccttgatttgccccccagatcagcatgcctatttgatacataaacagcagtacatagaggtgaaaaatataaaagaacataggcacagagccatacactcgcagcgcattagtaaagcggttaagtggtctttcaaataaccataagccaacaaacatgcctgctaacgtgatcagcaaaaagctcagtgaaggtgggtacttagtcacgttaaataccgacatcatggtttcggttgtggtgctaaacgtttgccacggcaaggtttcaccataaatattaaaaccacgcagcagcgcaaataatcccacacataacagggctaacagcagtaatgctcgtttacgcgaatctgccgcttgagtgtgcgcatataaagggcctgcacagtaacccaataaaattacgccaatccaaggcagcactgggtagctaatttttacgtcaattaaaccgccttgtgatagatagcctcggtcatgcaaaatcgtccacagcgagtaaccaaactcatcgggcgtaaagctgattggggtcagtaagttatggccaaatacgataactaaaccaagcaccagcaataggttgcgtggcagcttaatcaatgctgctaacaccagcatacaaaggccaatcgcccacatcacttgtagccaaatggtgtgatagtaacccatccacgaaaaacaaatcagtgtcacttcgagggcgattaaaaaaagccctcgcttgattaaaaagcttcgtgctgagcgcgccacgccacttgctgggtgactataaagccacgccgacaaaccggttaaaaagataaaggttggcgcacaaaagtgcgcagcaaagcggctccaaaaaagccccggcgaagtggtatcaaccaccatgggatcggccacctgcatgtgcaagaaaaaccgctctcgcacgtgatcaagtaacatcagcagaataacgacaccacgcatgatgtcgatactgtgaatacggcttttaacttgctcagaagtcatagcttaaacctaatttgaattgtgttggtgcacccgggtaggcccacaatgcattgtaagagctggcgatatactgctcatcaaacacgttatcaacattcagtgacaccgttgtacgttcagtcgctcgccatttagcaaataaaccaacggtttgatagctaggtaatcggaaggttaaatcagctgggtcgcctaaacggtcagacacatattgataatgaccgccaacctttatgtcttgtgcaaatacacttaggtcatggtttaagccaatcgaaagattattcttcggtacgttcacaagcgggctgcctttaggaattggcactaaccaatcaacatttatgctgtctgtggcagtttcggcatcaacataagcataggatagggtgtactcagtgttatcacccaatgaccctgttaagtctaactcaaaacctgtgctatttgctttaccaacaggtgctgaataacccacatttactggatctgccaccagcatattgctcttacttgcatcaaaataagcaagcgtaccgctgatattggcgtaactaaacttaacacccacttcaaacgagtcactttcttcaaaaccaaatggcttaccttcggcatcggtgccacttagtggtaaaaagccttctgaatagcttgagtaaaagttaatgtcgtcattaagggcataaaccacaccaaaacgtggactaatgcggttttctttgctgtttgatgcaacaccagacttagtttcaaagatatcttgttcaatttcatcaaaacgcagacctaacatcacttttaagttatcggttagatctagttggtcttgcaggtaaataccgtacgcattttgctgttcgttattttcgtactgcatgcttacttcagggccttcagtggtgctgtactctggctcatagatatcaatggtgtaagtgccattaccaccacggtagcgataaagccccgtgcgtagctcatagtcgtaaccatcaacaccaaacagtacatgattggtgataccggcaacatcaaaatggccgcttaattcaaagcgcagcgataaatcatcagactcatagtcacggtatctgtgctggcgagttaaagttctaccatcatcaaataatgactgtcgcgatggtgaaagctcagcatctgacgaaaaacccgttaatgttgcagtacggtaactggcgcctaataacaaactccaatcttggtttagatcgttgctgtaatttaattgatgaccgcgtgagtgcaccttagttggcgcatcatttggattacctaaaaagcgcgattcaggcacggtatcaaaatcaccatttagcaccacaataccgcggtcatacatttgctgttggtcaacgtattcaaactcataggtcagtgatgagttatcgttaatttgataataaagcgaaggagtaatgacgaatttgtcatggtgaacatagtctctaaagctgtcgctatcttgccatgcaccattgattctaaatgctaaatcatcgcttagaccattagtgtaatcaccttgaatacgcttgtgatcatcgctacctaactcggcttgaagttgcccttgctgataaaactggggctttttagtaataatgtttactgtgccacccggctccgagcgaccataaagagctgagcccggcccttttaatacttcgatgtattcaatatttgatacatcacgcgggcctgcaaaaccgcgaccaccactaaagccattaactaaatatccagacggcatattttcgttacccgacaaaccacgtattgagtagctatcccacagcgccccgccattatttttacggctgatactggcagaaaaatccagtgcgtcacgaaacttagtgataccgttatcggtgagcatgtctttacttaatgtggtgatcgactgtggtaaatcttttgttggaatatcaccacggaacgcttgtttatgctcaatggtgatcgtttctatatcgctgttatcagctgcatatgtattcgctgcaaacgccgcagctaatgctaaactaagagttgagtacttcataaggcttaattgtagaaattgatagatatgttttgttataaaataacataaataaacagattgatatagtataacaaatcactttgttccgaatttttacctatctttttttgtttacataatgcaaattcacctctagtatcaaaaaatgaataaaaaacaatcaagttagggaaaactatgaataaatcacttttcgcattaacgctcgtatgcacatctataagttcattcgctaaccctgatttatcaggccgaaacccttttgttgatattcaagcacaggtactcgacacctccacaggtaagccaacatggcaacgtcttgatcatataccttatgtgcaatacccaactgggctacttaatcagcaaggtagtggctgcgcgattgttaactttgcagttactcccgatggtgttgtgaaaaaccttaatatcgtgaactcagcacctaagcgctttagtaaagacgttagaaaagcagcaaggcaaatagtgagagattggcaatggcctgaacgtactgatgatcaaacacttgagctaaccatgcgttttgattactgcctcaccttcgattacgacaaaaagagtgaggctatagctatgtgtgttgagcattcagaacaagcctgcgagtaaacaataaatttgccatttagatacttgagccaatgccaggtattgcctacaatggcgcacaatttattcaatgcagatcgcaactatgactgatacacaaaaaccagaattaccaaaccaactttctatcaacccacgtagtaaattttatgtggaagaagttttcgagcatgaaattggtgtaaaacttaacggcaaagagcgttttgacgttgaagaatataatatcagcgaaggctggatcaaaatcgcttctccaaaagcgctagatcgccgcggccaacctttactattaaaagtaaaaggcactgtagaagtattctacaagtaatgatttgtcggctaaagcctgctttagccgacactcccctaaatacatagccccattccatcgtttgatttttagacacattttgtaacactgcgttcatcgcaactgcatcgctatttaaaactgaattgttatgatgtaacagttcccaaaataggatgtaatcccatgaaaaaactaacaacgttggcactggccatggctgcgacactggcaccttgggcatcagcttacgaaacaaaagatacgcgcttattgcgttttccagatattcataatcaaaatgttacctttgtgtacggtggtgatatttacattgctaatacgcaaacaggcgagagcaaacgcttaaccgaccatattggctttgaaacctttccgaagttttcacctgacggtaaacgcattgcgtttgcagccgaatacaatggcagccgccaaatttatgtaattaacagcgatggttctggcttaaaacaactcacttactacaacgatgttggcccaatgccaccacgcggtggttttgattatcgtgttctcgattggacaccagatggcaaaaatgtggtatttcgtgctaaccgcacaccgtggggtaaacgtatgggtcgtccatacatggtgcctgctgacggtggccttgagcagcctctcgctatccctgaaacgggcggcggtatgctttcgccagatggtagcaaatatgtttacaccccgattgaccgtgaatttcgtacttggaaacgcacccggggcggtcgcgcacaagatgtttgggtttacgatctaaaaaacaatacctcagagcagctaactagtaaccgcgcaaccgatcagcaaccaacctgggttggcgacaacatttactttgtgtctgaccgtgattacacccttaacctgtatcaataccaaaaaggtgctgagcctaagaagctaaccaaccataaagactttgacgtactgtggccatcagctggcccaaatgctgttgtttatgaaaatggtggttacctttatcgctttgacccaaaaactcaaaaaagcactaagctgagcattaacattgctggtgtgcgtcaatacgcaatgccgtacacaaaaaatgtgagtgactttatcgattcaatgtcgatttctcatgatggtaaacgtgcactctttactgcccgcggtgagctatttagcgtaccggttaaacaaggcccaacacgtaacctatcttacacagcaaaaggccgcgagattgacgcaagctggtcgccaaatggtcgttatattgcttatatgagcgatgaaagcggcgaatacgaaatttacttaaaagatcgcagcgacaacaatgccactaagcagctaaccagcaacggcactatttggcgctttacaccaatttggtcacctgatagctcaaaactgttatttgcagataagaatcacacactctggtggatagacgcaaaatcgggtaaacagcacaaaattgataccagcatctacgatgaagaaggtattcgccagtatacttggtcgccaaatagcgaagacattgtgtatgtaaaaaacaatgaaaaccgctatgcctcactgtggcactacaatattgataaaaagaaagtgactcgcttaacggatgaaatgaccaatgagcaaaacccaactttctctcctgatggtcaatacctgtacttcagctctgagcgcgactttaacttagcctttagcagctacgagtttgactacatgtttaatcgtgcaacgcgtatttatgccgctgccgtaaatgacagtatcaaaccacttatcgcactacaaagtgatgaaacagcgatcgtcagcgataaacaaaaagatgacgataagaaaaacagtaataccctgcaaagcagcgactttatgcagcgtgtaaccgctttaaatgcaccggctggggattatcgcagtttaacggctgtaaaagatggcgtgctaacactggctaatggcggcctacaattaataggcacagctcacgacagcgagcttgaaactgtggctaaaggggtaagcagctacactatttcgagcaatggtgagcacctgttagtgcatgcgggtaacgattacagcttaattgagcctaaagcaaaacaagacctagcagcgaataagctagatcttagtaacatgaccttaaaaattgagccacaaatcgaatggcagcaaatgtatgttgaaggctggcgtacattacgtgattggttctacgacgaaaaccatcacggccaagattgggacgcaattttagccaagtatcaacctatggctgatgctatctcacaccgtagtgacttagattacattctcagtgaaatcgcaggtgaaattaactcaggccacatttatgtgcagtcgggtgatatgcctaaagcagagcgtaaaaagcacggcttattaggtgcaaaacttgccagcgatccatctggatacgtaaaaattgagcaaatcttccaaggcgaaaactggcatgaagacttccgctcaccacttggtacaacaggggtaaaagcacataacggcgactacatcattgccgtaaatggccgctcagtaaaagacgtagctaacttctacgaattgctagagaacacccaaggtgagcaagttgagctagttcttaacagtaaaccgcgcagcaaaggcgcatggcaagttaccgttaagcctgtagcgagcgaacaaggtttgcgttatttagattgggttaactctcgtgcagcctacgttgataagctatcaaatggccgtattggttatgttcacttaccaaatacagcctacgaaggtaaccgcgccatgttcaaaaactacatgccgcaaaccaccaaagacgccatgattattgatgaccgatacaatggcggcggctttattcctgagcacatgatcacctggcttgcccgtaaaccgcttaattattggaagcgccgtggtgttgagccaactaaaacaccacaatttgctcatgatggtccaaaagccatgctgatcaatggttactcaagttcaggcggtgacgctattccttactacttccgccaagcggggttaggtaagcttattggtacccgtacttggggtggattaattggtatttcaggtaatccaagccttgtcgatggcggccaagttatcgcggcaacattccgcattttagataacgatggcaactggatcatcgaaaacgaaggtgtcaccccagatatcaaggtggttgaccgcccagagctaatctaccaaggtaaagatccatcgatagagcgtgccgtagaagagcttttaaaagagctaaaagacaacccgaaaaagccactcaccgtgccaccagcaccgactgacttttaattcttaactggttgttaaaaagaaaaaaccccgctgcaatgcggggtttattttaaggctattaaggtttcttccagccactccaaacatcgtcttgttggttagctttattttttttctttttcttacctgttcccgcaggtttcgctacgggcttgtcgtttttaagtgcttgtgcggcatcaaggttcgctttatttaaggtataaccaggcacttcttcacgctctaaacgaaatttatttttcttttcaatgattttaaaatgatgaaagtcttcataatcaatcaatgataacgctaaccctacttcaccggcgcgaccacttcggccaatacggtgcatgtaatcggcaggactgcgcggtaaattgaaattaatcactacaggcaatttagcaatatctaaaccacgggctgcaatatcagtggcaattaatacctcgatttcgccatttttaaacttttcgattacgcgagtacgctcactttggcctttatcaccgtgaaatacttgtgcattgatgccacgcttttcaagcttatttgctaaatgctcacaatctttttttgcattcacaaaaatcagcgtttggcgccatttatggttttttatcaagtgcgctaaaaccgtggtcttctcacctttatttaccataaatacgcgctgtactaaggtgctttcatctttactttgaacttgtatttcaacaggctcatttaacaatttttgggttaatagtgtaacttgctctgggaacgttgcagaaaacagcatagtttgttttttagcgggcataagcgctaatagctcagcaagctcttcggtaaaacctaggctcagcatgcggtctgcttcatcaagcactaaggtgtttactttatcaagcttaatggcattgcttgaaatcaaatcaagtaaacgaccaggagttgcaacgataatatctgcaccgcctcgcaatgcttgcatttgcgtattagcagagacaccaccaaatatagcaagggttttaatcgcaccattaaagtttgcagaatatgatttaacgctatcagctacttgtacagctagctctcgcgttggcactaaaataagccctgaaacaaagttacctttaccttgtgtttttttaacagccttacctaaaaaacacctttgcaacataggcaaagcaaatgtcgctgttttacctgaacctgtattcgctcctgcaattaagtcactgcccgccaaaatactcggaattgcttttgcctgaatgtgtgtcggttgcgtgtattcaagatcagataatcgagcaagtagctcaggtataagaccaagctcgttgaaattgctagggtttagggttgaggtcataaaaggtgtgggctcataactaaaatagcctgcgattttagcgcatttattgcccggtaagtaggaattagtgagttaaataccttttagataacagtcactggtttatgatatttgctcaatattaaaggggcgcttaaaaagccaactgctaagttggccatattattaaaccttactcaactgtgcttgtagcctcgtttttgtttcttttaagtaatctaggtaaggatacgagtcatcagctacggctattgcagcctcgatttgaactaatgcttggcgaacattaccttgcatttcatagccatatgacaaagctgacagtgcatacgctgatttagggtagtttttgatattgtacttaaacacctcaatagcccgctcaaatagctggttatccgttaagctgtaacccagcatcctaacagcgcggtcaggtggcgctatttgctcgccccattgctgagataagcgttgataataagcatcaattgatgaaacatcatcgtccaatgcactcaaaggcatatgtttagataaaaataagccatggtacgcattaaatgccccagcagctgaggttaggttatgcgaaacgcctgcaaaggcgtcgctcttaaagcgcagattttgcaccttactattttgcatcgtttgctgcatatcatcgtatctttcgcgcataatgccggcttcttcgccgatattcatatatacatagctgttaatacttttggctttagtaacaaaggtatttagactcttagcaggggcgccatagttccaccataccgcagggctataagcaatgtgcgcttgaaataactcagggtcagcttgcattgcgtaaagagcaaatacacccgcagcagaggctcctgcgataactctataatcatgagtacgatactgtttattaaccaaaggcatcagttcttgctctacaaaagctaaaaactttgctgcaccaccgccttcgccaacaggcccttgtggctctttgttcactgtaggataaaaatctctaagtcgattagtgctttcaatcgcaactacaatcacctctggcgcttgatcatcttgttgtaagcgctcaagcacagcattaatcaatggtaaattaccggccccatctaaacggtaaataacgggatatcttttgtttggttgtgtttgatagctttttggtaattgcacaacgacagtgcgttgctcactaagattacttgattcgatagtatgcgtatgttggctgtaatttgtaaccgcatcatctgcggctggttcagccattacatgactagtacagagtaaaaaaccactaatacagagtaacttaaatagtcgcacgacttatccttaagaaatattggtaattttttaagctaacagaattactggtacaaaaaaaggcgcatagtgcgccttaataaatataaactctaaacttactcaaccgtcaccgattttgctaggtttcgaggttggtctacgtcggtgcctttaataaccgcaacgtagtatgaaagcagctgtagtggaattgtatatacaactggagcaattacgtcatccacatggtttacgttgattacacgcattgtttcgtcagattcaaacgctgagtctttatctgcgaatacatagataataccgccacgggcacgtacttcttctacgtttgacttaagcttttcaagtagttcgttgtttggtgctacaacaatgattggcatgtcggcatcaatcaacgcaagaggaccatgcttaagctcacccgctgcgtatgcttcggcgtgaatgtatgaaatctctttcagcttaagtgcaccttccatcgcgattgggtattgtgaaccacgacccaagaatagtgagtggtgcttgtcagcgaattcttcagctaaatcttcaataccctcagcaagcaataatgcttcttctaacttgttaggtagtgttttgattgcatttacaatcgcactttgatctaagcctttttcttgcgcaatcgaagccgttagcattagtaagccaacaagttgtgtggtgaaggctttcgttgatgcaacaccaatttcagcacccgctttagtcataaaggctaaatcagattcacgtactaatgatgaaccaggtacgttacaaatggtcattgaagccatgtaaccttgctgttttgcaagacgaagtgcagcaagcgtatcggctgtttcaccagactgtgaaatggtcacaagtaagctgttgtcatgtacaaatgattcgcggtaacggaactcagacgcaatctctacgttacagctcacaccagcaaattgttcaagccaataacgcgcaaccatacctgagtggtatgaagtaccacaggcaataatttgcacgtgttttacgtctttaaagatttgctgagcgctttcgccaaaggcatcaatcgctacagtatcattgtgaaggcggccatcaagggtgttacgtacagcaagcggctgctcgtaaatttctttcagcatgtagtgacgatattcgcctttacctgatgcatcttgcgtaatgtttgattcaatcacttcgcgctcaactgcatcgccgtttgcatcaaagatttctacactgtcacgggtaatacgcgcaacatcaccttcttcaaggtaaataaagctgcgtgtaactggtaataaagctagttggtcagatgcaataaagttttcgccaagacctaaaccaatcaccagtgggctacctgagcgcgctacgatgatttcgttgtcgttcgctttatcaaaaacaacggtgccaaatgcgccttcaaactgcttaacagctgcttgtactgatgctaatagcgtatcgtgctgttggcgaagttggtgaataaggtgcaccattacttctgtatctgtttctgataaaaactcataaccgtcgccttttaatgcatcacgaaggctggcatggttttcgataataccgttatgaacaagggcaatttcgctgttcgaaatatgtgggtgagcattggcttcggttacaccaccgtgggttgcccaacgcgtatgtgcaataccggtagtgccattaacagctgcatcgttaagtgccgcttcaagatttgcaaccttacccacagctttaaccgtgttaagcttattacctttaagtaaagccacgcctgccgagtcatagccgcggtattcaaggcgttttaggccttcaacaagaattttatttactgggcgttctgcaacagccccaacgattccacacataatctctccttttgcacaggccaaagcgttttactttgggcggtatgtgttgtcataaatttaatgtaataaggtgttgtcggtcttattacgggttattcaatttctgcacagatcagctgtacaccacacgcttttatcgcctcgcgtttatcttcgcttaggttgttgtctgtgataactgtggtcacacgctgccaaggcagttctaaattaggaattcttcggccaattttttctgactctaccagcaccacaacctctcgggcagcttcagccatcacttggctaagcccaactaattcattgaaggttgtagtacctctatcaacatcaatgccatcggcaccaataaagagctggtcaaagtcgtaagagcgaagaacattctccgcgacttgaccctgaaacgattctgaatgcggatcccaggttcccccggtcatcaataatgttggctcattttctaatgaaagcagccggttagcgacatttatagcatttgtcattaccactaaaccgcgcttacttgcaagctcagggatcatcgccgctgtagttcggccgctatcaatgatgatgcggttatgatctttaataagctttgcagccgcctgtgcgattgccattttgcgaagcgagtcgcttttctcgttgctatttgcaacgatttcttgcggcaatgcaatagcgccaccgtaacggcgtagtaacaagccacttttttcaagggctgtcagatctttacgtatcgtcacttcagaagtttgaaactgctcagctaacgcttcaacagcaacttcaccaagttcattcacttggcttaagattgtatggcgacgttgttgagtgtttcgttttgtcataaagtgaataacataagtttcgtttcgaaagttgtgagattttaaacgaaacaatataaatggcaagtgaatgatcattaacctacacagctttaattttgatcttcatcaccaacacgctaagctattagcaaatataaccatgaacatacccgatgaaagagtttaatagcctcgataagtccttactcgaacaacgaaaaaatgcccatgaagtttgtcgtttatttgccaaaagcccaagtaaaggtaacttaaaacgactaaaaggcatgtttgctcagtgtggcgaacaggttgttatagaagcgggttttcattgtgattatggcagtggtattaaaataggtgatcgaaccttcataaatattaactgtactgtactcgatgcaccgctatctgatgcgcaaattacgataggcgatgactgcttaataggcccaaatgtgcaaatactcgcggtatcgcatgcagtaaacccaaccgagcgtttagcaaaagctaattttgcagcgccgattaacattggcaacaatgtatggattggtgcaggcgctattatacttgcgggtattaaagttgctgataattcagtgattggcgcaggggcaatagttaccaaagatgtcgcggcaaatactctagtagcaggtaaccccgcggtgaaggtcaaagacctttaaccctatccttacgcgctaaagcatgtcctacgtagacacaaggtcgtcatttatggtggcaaagaatacataataacgcgctaaagcacgtcctacgtaggtcatcatttatggtggcaaagaatacataataacgcgctaaagcacgtcctacgtaggtcgccatttatggcgacaaagaatacatattaacgcgctaaagcacgtcctacgtaggtcgtcatttatggtggcaaagaatacataataacgcgctaaagcacgtcctacgtaggtcgccatttatggcgacaaagaatacataataacgcgctaaagcacgtcctacgtaggtcgtcatttatggcgacaaccaatcacaagaaaacagaattccaatatggataactacctaaaatatcaactagcttttttcgcaaagggtttgctgcgatatatctggctacagctattctactttcttctttacgtagtgcatggtcatagtaagcaggttgccacaccgtttgcgaaaaactacgtctcttatttatctctctagcagaaagaccttttagatgaccaactgttttacccaagctactatcgctaagccttaataaaccatgaaaatgatcaggcataagaacccaagttaaccagcaacattgatgtattaattcatttatttcaatacacctacaaaatacttttgctaagttatgatcactgaacagtgcttttctgttatggcagttggacgttatgaaatattcacctgattgaattgaaactcgtcctttttttaaatggctccagctcatgaaaaatcctttttcataaaattgtagaacattaaatatagtagattaacgcactaaagcacgccctaccgtaggtcgtcatttatggcgacaaagaatacatattaacgcgctaaagcacgtcctacgtaggttgtcatttatggcgtcgtatttaaaagtaaaaaagcccagctgtattgctgggcttatagttgggagctagttaactgttattcataacgtaaaataagcgatggtctggtgcttgcggccttaaaggctaaacttgcaacggtaacccaggtaatcacggccaccgcggcggcggcaactaaatacacccatacagcttgttcaatgcggtcattaaagtttgctaaccaatcacctaccaagaagtaagtcactgggtacgcaatagcaatactgagcgccaccagcactaagaactctttagcgatgatatttacgatactgatgcgagatgcacctagcacttttcgaacggccacttctttttgacgacgcactgttgcaaacgaagccaagccaaaggtacctaaacaagttaagaacacagcaagacaggtaaagattaaaaccacattcgaaattcgctcatcaccttttaacagagttttgtagttgtctgcgagtaagttgattttcggctcatagatattggctgagcttgctaatacttcagcgatctgagctttaatataaggcaagttttgctgatcaatcgttaaaattaattctgacacaggtgataagaagttaaagccacacaagaacataatatttgagttggcatctttagcattacctacttttacatcttcaaccacacctacaacacgcatatctacgccacgacctgagtctttaattaccttaccgataatgtcactcatgttagtgtaacccgcttgccttgcgacagattcagtcacaatggtacccgtacttgttactccattttcgcggcttgcccaatcaccagcaaattcacgactaaagtcacggccagcaaccagttttaatcctagcgtttttacaacatcgtagcttgcgccaacaacaggcgttaagctgccagacgcttcaccatttggccatgttggcataagtgtattattgattgaaacagttaaacgggtatcaatgactgttgtttgctgtacgccttgaattgcactaatacggttaactaaggcatttttttcttttgtgaatacttcgcctacaggtagctctgaaataaccaatctttgtgttgtttcatagcctaaaggtaagctttgtaagtaagttaattgctttaacaaagtaacagaggcaatgattaaacctattgctagtgaggcctgtaaagttagtaagctcttacgaacccatattgcagtattaccacgctgtaagtcaccacttaaaacgcgttttgcactgaatgatgaaataaagaatgcaggataaagcccagctaatatgcccacagcaattgcgaccacaataatggcaatgccaaattcagaggcataattcacgaccaattcgcggtctactaattggttaaagcttggtaaaaatagctccactaaagcacatgcaatcaccattgaaagcattgataccaacacagattcagataaaaactgcgttactaattggcctttacttgcgccaagcgctttacgcacacccacttcttttgcacgtttcgtcgattgagcgacggtcatattaatgaagttaaaacctgcaataagaataagtaacacgcttaaaccaacgcaaatcataaccacttgtttagcaccacccgctttcatctcaaacggtgatttagccgttaagtgcaaatcaagtaatggatgcagctctaaactaacttgatccagcatcgaaccactaaaaaagcgctctgttaaggttttagctaatgcaactgtatcggtgccctctgctaaacgcatataaacataactactgttgatatctatttcgcttggatcatgcttaacataaacaaggtttttaaaggcaaagtgagtgttatctgctaagtcagcaaacacggcacgcactgtgtactgtccttgttcatgtgtaagtgtttcaccaatcacatcggtgcgaccaaaaatgcgcagtgcttctgactcacttaaagcgaggctgtctggtgtactcattgctgttgttaagtcacccgcaatcgtctccatagcaatgaaattttcaatatttgcagtagcaccatataaggcatttaacttatagccttggttgcggtaactcacatcaaccatggcttcacgagtcaactcgaccatagttaatccgaacacttcttcaacttggctgtaatcttcggcctgctttgactgcacataattaaaaataggcaccacagataaaccaagttttgagaagtcttggccaacgcgataaacccgctcagcatgaggctgttggctatcgtacgaaagctcattttttgcaaacaaagcaactagaattgccgcagctaagcccacacttaaacccagaacatttaaaataaagtgctgtttttggtttttaaacgcacgcagcgcggtgatcaaataacttaaaatcatgttatgccacctctgctgtttgttgaacacggttagctttatctaccatcacttggccatcaagtaagcgcactaaacggtcagcataattgccttctttttctgagtgagtaaccacaattaccgtggtaccttcacgatttagctcacgcagcatcgccatgacttcatcaccattttttgaatcaaggttacccgtaggctcatccgctaagataagttttggattaatcaccagtgctctggctactgctacacgttgctgctgaccacccgatagctgctgcggtaagtgatctgctctatggtcgattgcaacacgctttaagattgcttctactcgctgtttacgttcgctttttgagatattttgatactgtagtggcagctcaacgttttcaaatactgttaattcatcaattaagttaaagctttggaaaacaaaaccaatcgacgcttttctaagtgccgctaattgtttttcaccaaaccctgcgatgtcttcacctaaaaattcaaaactgcctgctgatggcgaatccaacatacctaaaatagaaagtaatgttgatttaccacagccagatggccccataatggcaagaaactcgccttcgtttacatgtaagttaatgttattaagcgctgttgtttcaacatcttgagtacggaatacgcgtgataagttagttaatttaatcattgtttttatccttaaaattgtagttgttgtgctttatcaaagttgctgtagctagaggtgatcacgcgatctccggcgcttaggccacttaacacttcataatagttttgattctttttgccaagacgaatgtcttttcgtactgcacgattgccatctttttccatgacataaacccagttaccccctgagctggtaaaaaaagcgccacgctcaagtaataaagcagtgcctttgctatcacctagcatcagctgcacatcaaggctttgcccacgctttatgttgctcgtgccattgggtaaatcgacttcaacctgaaactgtgattgctgaacacgactatcaattttgctaactgttgccgcaatttcgccttgctcatgttcaatcagcacttgcatacctgtttgaacttggcttaggtaaaactcatctagtcgcacaactagcttgtattcattaggaatatcaatctgccctaggcgagcaccacggctttttgattcaccaatttcaacatcaagctcacttaaataaccatccgcaggtgctgttacgagtaggttttcaaggttcttacgcgcaaactgtaggtttttctctagcatgtcggcactgtcttttaactgagcgacctgaacttcacgaatgctgttttcttgcttttgacgctcaagagttagttctttacgcgctttgtaatacgctaagtcttcttgaatttcagataattgctcttgtgctaacacacccgttttcactagcggctgagtctgttttaagcgacgcgataaatgtgtgattttaagatcgatttcaagcaaatcacggcgtaagtttaaacggctggtttccatattcatttgcgtgttacgtaaaaagttaagctgctcagtcacctgtgcttcacggctcattacatcaagctgcaaattggtattgcttaaacgcacaagtggttggccttttttaacaaattcaccctgctcaacaagtcgctcttcgacttggcctccggcaatggtgtcgaggtaaatagtagtacgaggcataacctgaccacgaagacttaaagcatcaacaaattcaccttgctgtactgtgctaatcgttaagcttgtagcgcttacttgctgactacgacctgtttgctcagtttgtgtgaaaccataagctgctgccgcaacagctaaacatgctgctgcaattactgatttcttaaaaaatgctttgttatttgagcgtgtaattttcttatccatgttgacgcctttaagttatctaggtgctaattacctatagataaaacaactcttgtgccaacttttatttttattaaattacaacagcttatattaaaacgaataaagataaatataatcaagtgtccgcttatagaacacttcaaaacccatatatcgtccataaatggacactgttactattttcaattagtcttagtgttcccataaaggaataataataaatagctatgaaacaagcaggatcaattcttatcgtcgatgataaccccgacgtactcatcgccgcacgattacttttaaagcagcattatcaggttgtaaaaaccacagataacccctttgatatcgaagggatcattaacgcacagcatgaagcggatcaggccatagatgttgtgttactcgatatgaacttcacgcaagactcaattagtggcaaagaaggattctactggctaaaaaagatcatgagccaagacgctaacattgcggtactgcttatgacggcctacagcgatattcagctagctgtcgaagcaattaaggccggtgcctctgactttattgccaagccttggcaaaatgagcaattactcggtgctgtagcggcggcattttcacacgctaaagacaaacagcaagttggtaagctcacaaaacaaaagcaggccttgcagcagtcaatcggcaatcaaacatttgagtttttaggccaaagtgatgccatgcagcaggttttttcggttatcgacaaagcagccaacacagatgccaacatattgattagtggcgaaagtggcacaggtaaagaactcactgcccatgcaatccacaatgcaagccagcgccaaagccaacccttcataagcctagacatgggctcactagccgaaagtctgtttgaaagcgaactatttggccataaaaaaggggcgtttactggcgcgaaagaagatcgcattggccggtttgagctggcccatggtggtagtttatttttagacgagctaggtaatttaccgcttaaccaacaagttaaactgctcgcagcactacaaaacaggcaaataacaccggttggtggttctaaagtcatcgatattgatattcgtttgatctgtgcaaccaatgaaaacctcgaacaagcagttactgaaggcaaatttaggcaagacttactgtaccgtgttaataccgtagagatccgtttaccagccctgcgtgagcgcagtgaagacattccattactgtgtaactactacttgcagcactttgcacataaatacaaacgtgagctctcgattgcagcatctgatatggcacgtttaagccagtatcattggccaggcaatgtccgtgaacttgcccatgcaattgagcgagcagtcatcctgtcggaaggctcagagctcgatataagctcagtgataagctcaccaagtgcagctattagtacaaatgacatctcttcaagcgccaatgactacgacacttttgatctcgaaatcatcgagcagagaaccgttcgagcagcattaaagcattttcaagggaacgtgagtcatgcagcaaaagcgctcggcctaacacgcggagccatgtatcgtcgtctagaaaaatacggactttaatcgatgcgaaactttattagcttagccagcctattagccgcattaataggtttatcaattgctttgttttggcaagtagagcaaagcgggttttctgcaatttcggcacttttagtaattttaaatttggtatgtgccgcgcaaatttttaatttatttaaacgccaaacaaggcgtgcagatatggtgtttcgcgctttagcgaatggagacagcacattaggctttggcgaccaacaccctatgcagcagcaatttgagcaggttaaacaacaaattcaggcagcgcgtttcaatgcagagcaacaagctcagttcttacaagcgctattaattcatatcgatctagcggtattagtatgtgatgaacaaggcactattattgaaagcaatccggcggttagtcgtttgcttgggcaggctgtaaagcacatcgatgatttaggtgtaatagccaacctagtccaagacgcaaagcgaaatagccgtaataccgtgccatggcaaaatggtgagcagcacgatacgttatctgtgcagatcagtattgccgaaattcaaggtaaagttcgtaaagtgatcagtttgcaatcgattcatgatcagctgcaattaaaagagcaacaagcttacaaacgcctaaccaaagtactaacccatgaaattgctaattcgattacgccactctcttctttagcacaaacttgtacggcgctgctgccaaatgagcttagttttgatgatcaggaagataaacaagacttgcaactcgccttatcaacactcgcatcgcgaaccgagcatttaggcgagtttatagcacaatttaaaaaggttagtagcttacccgccccacacctaaagccacatgttctggcagatcttgctaagcaagttgtcgctctgcactcacagcaagctaagcaacttaatattacgttgaatttatcggtgcaaagccaacagctagtgatgatagataggggccaagttgaacaagtaataataaacctgcttacaaatgcccttgatgcactaaagcagttaaataatccagagtcagcaaagtgcattgaggtaagcattgcacaaaatgctaatcagcaactgtatttagaggtcagcgacaatggtacaggtatcagcgaccatgtaattgagatgatttttgtgccattttttactaccaagcaacaaggctcaggaataggcttaagtttatcgcgccagatcatgctcaatcatggcggcgatctggtatatatcaaacgtcaacaaggagcctgctttcgctgcgtgttcggttaacttacacagttagaacaattacttacaatttgctaaggcgccgtttggtatcatgtacccattaacgtttaatggactaaccaatatgaagtatctcgccttagcattgttttcatcacttgccttcattcctgctacaagctttgctggtatttatgacagcccagatatgaacctgtttgttaaatcagagcataatagtactgattcaatcacctcagcgggcatcgaatttatggctaaaaataactacagtaattttggcgcagcatttacaacggcactaggctctgcagaagtatttactaaaaaaggtgatcgggagacatttctaaccttagatagcggcatcaaatttggctatttcagtgacttttttgtctatggcgaagtgggcttagatttaattgagcttgctttctacgacgaccgaaaagaccatgattatagcgaccgctatgatgacgaccacaataatattgatggctatgttggtgtgggtatgggcgtggactcaaagccattcagaatagagatctatgccagagcccgagaaatagacagccgttattgggaagcacaaaaccatggttacgctgggttacaagttagtatttcgttttaatttcaattgggtgagtgagttagcaagctgttaatctaatggtcatttttagctcaccctatgttaagcttaggcgctttagtttacccgcacctaagttaacggagtattttaatacgtgtttttaaatcgatttttaggccttgttgttgtttctcttattgtaacaggctgtcagactgcccctgagtctctccctgaaaagaagccaataattaaggcaaatccaggcactgtggttgcagaagctaaaacaaaacaagtagacgcggtgacaccgctaaaaccaagtgaacttgatgacgtatggcagcgtattcgcattcaattacagtttagcgattcaagtcatccagatgtgcaaaagcgcattgcttggtaccttactcacccaaattacatggaagaaataagccgccgtgcagcgccgtatttgtatcatatcgtcacagaagtagaaaaccgtgacttaccaatagaactcgctctaatgccgcttatagagagcgatttcgatgccagtgcctattcgcacaaacatgcatcgggtttatggcaactcaccccctcaatcgccaaatactttaaagtaaaaattaccccttggtatgatggtcgccaagatgtgatcgacagcacccgcgcagctttggattttatggaatacctttataaacgctttgatggtgattggtatcacgctattgctgcctacaatattggtgaagggcgagtattacaggcaattgatcgtaataaaaaacaaggtaagtcgacggacttctttagcttaaagctaccatcacaaaccaaacaatacgtacctaagttactggccgcagcacaattattaaagcaccaaaaaatgatattccctgcaattaagaatgagcaggctattgcgaccttaccagtgacaggtgctgtgatcttggcagataaagcgaaatggcaagagcttgaagagctaaaccatggtgttatccgatacccagcggtgattgatgcgccacatattgtggttcccaaagatcagcaagcaagttatcaagctctattagctaaccaaaaaagcaatgattatagccagtggcaacattacacagttaaacgcggtgatagcttaagtgtgattgcaaagaactataaagtaacagttagccagctgaaaaccttcaataacctaaaaacaaacaccattcgtattggtcaaaaactgatattgccgcaattagctgatcaacaaatcgagtataaggtgaaatctggcgacagcctttggaagatagcaaagcaatacaaagtcagtatcactaaactcaaacaatggaataacctttcaagagatagcttaagagtgggtgaaaagctcaccgtatttatctcaaatagttaataccaaatcagggagttttactccctgtctcttttatatatccaattaaagttgtatctttgttagtctataaaaacaacaactaaaaattatggataatcagcaacaggacgcaagctgttcaaccgttaaatcagaacaagacactaacgttgaagagcaaacaaagaccacccagcaaaacactcaaccagccagcaaccagcgcaaggcatggtttaccaacgagcggctaaacctatttctcgcactatgtgccattataatttcagcagcctccttttatgccacatacttacaagccagcgccgcagaacgacaagtaaaagccgcaacctggccatggctcgaagtgatgacggggaatttcaatgaagaaaaaaattatgaagaaatcactatcaacattaaaaactcaggatcaggcccagccattattaaatacgtaaaattcttccacgatgaaaagtcgtatacagagatatttgaagtaataaaggactgctgctttgatatctatgcttaccaagagcaattaaataagttgcaaaatgagtcaccagagatcaatttctttgaaaaatttggttggttgtataccggcgttagtaataaccgattattagcctcaggcgctgaacttaatctttttggttttaagaaaacaggcttcaatgcaactcagtgggacaaggtaaatgaccaacgctttaatatcaaaaccgagatctgctactgctcgttgctagaaaaatgctacctaagcgatggccgcggcgatgtgagagaaatacagcagtgtgagtgacaccgagctatcagctttcagcagtcagcgatcagccgcgtggtgtgggtgtttgttgctgcgtctacctctgccggaggctctaggttctaggttctagtactctttcacatatattttgatcagttgcccctacttaaattcaggtaactgatctttttcaatcaataattcaatactcctgctttttccagtaactgatgttataaatttcttcttcttaagaactgaaatcattgaatgaacacttgaagatgcggttccaaagtagcgctcaaaatcactttcagcaggcgcaatcccattcacttttgtgtagtaataaataaatgctaaatactgaccttgctttgctgtaaacagtggcgactcttctttattcataatgaacttttaccctaatcaacgatcctttaactcatataaacttacttaatattgttatgaaccgaaagtatattgttgaattatcagaagaagaaaaacaagaattagtagactattgcaaaaaaggcatggtcaatgttcgaaagtacaagcgggctgctattttgttaaaagctgaccgttgtagatatacaacagagcaaatatgtgaagctgttcaagtgagctcttccaccgtatttcgagtcaaacgccagttcgttgaagagaatctagcggcagctttgaatgaaggtgcacgaagtggtgcaatgagaaaaacttctgcgaaagatgaagcaacgttaatcgccacagcttgcactaagccaccaacaggtcacgctagatggacattatctttacttggagagcgattagttacattaactgatttagatagtatctcgtatgaaacaatacggaggcgtcttaaagaaaatgcactaaaaccatggcaaaaaaagatgtggtgtgtggcgacaatggatgctgaatatatcgcgcggatggaacatgtgctcgagttgtatgctgagccagcagatgagttaaaccccataattaactttgatgaggcgatgaaacaacttgtagatgatactcgaccggcacaaccaatgaagcaggggcagactaagcggttagattatgaatataaacgtgtaggtgtggccaacttatttgtattcttcgatcgccatcgaggatggcggcatgttaaagcaacagaaagaaagacgaaaattgactttgctaattgtatgagggatttagttgatcttcattatccacatgcgaacaaaataaaagttgtgttagataacttatcaactcatacagaaggagcgttatataaagcattttctccacaggaagcacgccggattttaaataaactagaattacattacacaccaaaacacgcgagttggttgaacatggtcgagatagaaattggtaatatgaataagcaatgtttagatagacgtatagcaagtatggaagaactaaagacagaactcgcggcctgggaatggagcaggaataaagaaagaacaagtataaactggctatttaatgttgaatcagctcgtgaaaaacttgagagggcttatggtgccctcaactagtcagaacttgtgtgatgaagtactaggttctaggttctaggttctaggcaaagtgtacttgtaggaatggctttagccgtaaatgtgtttgttctggtctgaattcggcactgaagtgcctcctacaggggttgttgctgagggagactctctactaaacaacccaacaattcaactttacccttgctaactagcaactcgctaactcgttgggtttcgcttcgctctacccaacctacctaaagaatggataagtcacgttgtgtgaatagcttaaacgcaaaaaagcccgactctttcgaatcgggctttctctaatttggagcctggcgatgtcctactttcacatggcaaatgccacactatcatcggcgctgtttcgtttcactactgagttcggcatggggtcaggtgggtccaaaacgctattgtcaccaagcaaatttgggttgttaatcgcttttgcaattaactaaaatctggaattctgatattaagtaaatgtctactttagtgtcttaacttctgtctgttacgctgtcataaaacgcgtttggcgttgtatggttaagcctcacgggtaattagtacaggttagcttaatggctcgcaccacttccacaccctgcctatcaacgttgtagtcttcaacggcccttcagagactttaaaagtctagtgagaactcatctcgaggcctgcttcgcgcttagatgctttcagcgcttatcagttccgaacgtagctaccgggcagtgccattggcatgacaacccgaacaccagcggttcgttcactccggtcctctcgtactaggagcaacccctctcaattctcaaacgcccacggcagatagggaccgaactgtctcacgacgttctaaacccagctcgcgtaccactttaaatggcgaacagccatacccttgggaccgacttcagccccaggatgtgatgagccgacatcgaggtgccaaacaccgccgtcgatatgaactcttgggcggtatcagcctgttatccccggagtaccttttatccgttgagcgatggcccttccattcagaaccaccggatcactatgacctactttcgtacctgctcgacgtgtctgtctcgcagttaagctggcttctaccattacactaaccgtacgatgtccgaccgtacttagccaaccttcgtgctcctccgttactctttgggaggagaccgccccagtcaaactacccaccaggcactgtccgtaaccccgattaggggccaacgttagaacatcaacactacaagggtggtatttcaaggacggctccacaaagactagcgtctctgcttcaaagcctcccacctatcctacacatgtagggtcaatgttcagtgccaagctgtagtaaaggttcacggggtctttccgtctagccgcgggtacacagcatcttcactgcgatttcaatttcactgagtctcgggtggagacagcgtggccatggttacaccattcgtgcaggtcggaacttacccgacaaggaatttcgctaccttaggaccgttatagttacggccgccgtttaccggggcttcgatcaagagcttcgtccgaaaactaaccccatcaattaaccttccggcaccgggcaggtgtcacaccgtatacgtcatcttgcgattttgcacagtgctgtgtttttaataaacagtcccagccacctggtcactgcggctcccgtccgcttagagagcaagtctcatcacagataggagcgtaccttctcccgaagttacggtacgattttgcctagttccttcacccgagttctctcaagcgccttagtattctctacctgaccacctgtgtcggtttggggtacgattcggtataatctgaagcttagaggcttttcctggaagtatggcatcaacaacttcacacccttaggtgctcgtctcgtgtctcagtcttagcaacccggattttcctaagtcaccaacctactcactttcacatggacaaccaacgccatgcttgtttagcctgctccgtccccccatcgcaattataccaagtacgggaatattaacccgtttcccatcgactacgcctttcggcctcgccttaggggtcgacttaccctaccctgattaacatgggataggaacccttggtcttccggcgtgcgggtttttcacccgcattatcgttactcatgtcagcattcgcacttctgatacctccagcaaccctcccgggtcaccttcaacggcttacagaacgctcccctaccactcatacatagtatgaatccgcagcttcggtgcatagtttagccccgttacatcttccgcgcagaccgactcgaccagtgagctattacgctttctttaaagggtggctgcttctaagccaacctcctggctgtctgggcctttccacatcgtttcccacttaactatgactttgggaccttagctggcggtctgggttgtttccctcttcacgacggacgttagcacccgccgtgtgtctcccggatagtactttacggtattcggagtttgcaaagggttggtaagtcgggatgaccccctagccttaacagtgctctacccccgtaagtattcgtccgaggctctacctaaatagatttcggggagaaccagctatctcccggtttgattagcctttcactcctagccacaggtcatcccctaacttttcaacgttagtgggttcggtcctccagttgatgttactcaaccttcaacctgcccatggctagatcaccgggtttcgggtctataccttgcaactatacgcccagttaagactcggtttccctacggctaccctaatcggttaacctcgctacaaaatataagtcgctgacccattatacaaaaggtacgcagtcacccaacaagtgggctcctactgcttgtacgtacacggtttcaggttctatttcactcccctcacaggggttcttttcgcctttccctcacggtactggttcactatcggtcagttgggagtatttagccttagatgatggtccacctatattcagtcaaagtttcacgtgctccgacctactcgatttcacttaagatgcattttcgtgtacgggactatcaccctgtatcgtcaaactttccagaatgttccactaacacataataagcttaagggctggtccggtttcgctcgccgctacttccggaatctcggttgatttctgttcctacgggtacttagatgtttcagttctccgcgttcgcctcttacacctatgtattcagtgcaagatacctgcaagcaggtgggtttccccattcggaaatcctagtctcaagcgctttttactagcttgactaggcttatcgcaagttaatacgtccttcatcgcctccaactgccaaggcatccaccgtgtacgcttagtcacttaaccatacaacccaaacgggtctttgttagtgacagctgttaacttcgccagaagttaattcatcaaataatgatgagaatactaaagtagataccgattaatcattgctgattaactggcatatttttacttttgaaaactctttatagatacgaatatctataagaattttaatatcagctttccaaatttttaaagagcatattaattagttaaaccaaacggtttagctaactaacaatcatctgtgtggacactacgaacaaataagttctaaatcgtataaggaggtgatccagccccaggttcccctagggctaccttgttacgacttcaccccagtcatgaatcactccgtggtgaacgtcctcccgaaggttagactatccacttctggagcaacccactcccatggtgtgacgggcggtgtgtacaaggcccgggaacgtattcaccgcatcattctgatatgcgattactagcgattccgacttcatggagtcgagttgcagactccaatccggactacgacgcactttaagtgattcgcttaccctcgcaggttcgcagcactctgtatgcgccattgtagcacgtgtgtagccctacacgtaagggccatgatgacttgacgtcgtccccaccttcctccggtttatcaccggcagtctccttagagttcccgaccgaatcgctggcaactaaggataggggttgcgctcgttgcgggacttaacccaacatctcacaacacgagctgacgacagccatgcagcacctgtatcagagttcccgaaggcaccaaaccatctctggtaagttctctgtatgtcaagtgtaggtaaggttcttcgcgttgcatcgaattaaaccacatgctccaccgcttgtgcgggcccccgtcaattcatttgagttttaaccttgcggccgtactccccaggcggtctacttaatgcgttagctttgaaaaacaactccgaagagtcgagcttctagtagacatcgtttacggcgtggactaccagggtatctaatcctgtttgctccccacgctttcgtacatgagcgtcagtgttgacccaggtggctgccttcgccatcggtattccttcagatctctacgcatttcaccgctacacctgaaattctaccaccctctatcacactctagtttgccagttcgaaatgcagttcccaggttgagcccggggctttcacatctcgcttaacaaaccgcctgcgtacgctttacgcccagtaattccgattaacgctcgcaccctccgtattaccgcggctgctggcacggagttagccggtgcttcttctgtaagtaacgtcacagctaagtgctattaacacttaacctttcctccttactgaaagtgctttacaacccgaaggccttcttcacacacgcggcatggctgcatcaggcttgcgcccattgtgcaatattccccactgctgcctcccgtaggagtctgggccgtgtctcagtcccagtgtggctgatcatcctctcaaaccagctagggatcgtcgccttggtgagccattacctcaccaactagctaatcccacttgggctaatcttatggcgtgaggcccgaaggtcccccactttggtccaaagacatcatgcggtattagcagtcgtttccaactgttgtcccccaccataaggcatattcccaagcattactcacccgtccgccgctcgtcagcagagtagcaagctactctctgttaccgctcgacttgcatgtgttaggcctgccgccagcgttcaatctgagccatgatcaaactcttcaattaaaagttttttgaaaccgaagtttcgtgctcaatgaattctgtataaattgactatatagtcactcagttcaattgagactctaaatttgtttgcgtcatctagcgaactagaatctgctgttagaactcaatctgtacgagtgcccacacagatgattgctttatattgttaaagaacgtttcgagttgctttcgcgtctcgagggatgcgtataatacatccttaattttttgagtcaacacttaattttaaactttctttttagaccgttttaaaccgaagttttacttaactccctgtcactttgttcagcgcttttcattgctgcccgccgtgtcagtggatgcgcattatagggatgcgaagaattaacgcaagcactttttgaaggtttttttgattattttcaaaatagtataataaccatacaaataaagggctgcagagggattttagctcaaaaaacagtcactttttgagagtgataacggtaaggataaagcgatatacttaaaactagctatatcgctttttatctttataaggtggattagttagctttgatttcccagatggcaattgaacccgaaatttcattacctacaacaagcaatgcttcattcgttgcactttgttctgcaggtataaacgccatcccctcaggggcaagatcaccggttatttctgcatcggcttctaagccacggttaaaaaagtaatcttggaatgtcacattgtatggattagtaatatcaaacaccattatgccccccatgcgctctaaaccaataaatgcaaatgtacgatcaccaatagtacccagtgctaatgcttctggttcagcacctttgtcatcagagcgactatcgccggcattttcatcttcattattgttgaatgctgctccgtgaacagaagcggtaatacgtgagatttgatcgccagaatcaaaaaccaccatgccgttactatcccagatggtaaaagagcgagcgccgtatgcatagagtgactcgtactctccatcgttatcttcatcacctttaactgttgtcacttttaggcggccaatatcactattatcattgttcaggtaatcaaagttacttgccagcgttaagtctttagctctgctttcatctatataagataaacaaccatcatcttcatcgtaatcaagaccaccttttgctaaacattctgcttcatcggctgtgtcgaagaagtattcgcgtgcatcaccttcgttagctgtgacaataaagttagcacctttccaggtaaagcttgagatggtatcaggttgatacataccatatagaccagggtatgatttaaagttaacgccaccatctttatctgacgcatcaaaaagtaaattagaccaatctttaaaacctaagcctttaagctctagactattatcttcaagattgacgatagcaagggcgttattttcttgtagtgacacgtatgcaaacttattgtctttagaaatactgatgtattcaggctctaaatccatagctacagttgtattaattaaattaccgttgattgtacgcccagccggattagcaaatataacccctcgctcttcaagctctgcttgtttatcgttgtaagcagaaaaggtgatgctaatcgcggtatcagcaattacaccatcattgatgtttatgatgctaattgagccttcagggtcaatactgtaatccccattaggttcaccttcattagcaacaagtactttattaccatcatggctaaaggtaaccatatcgggtagggcacctacagtaacattcttaataaactgtggctcttcgccactaatatcataaaatgcgattaatcctttatcacccgtattactagctgccattgctacagctaaaagttcattattaatatcaatagcgatactgtttgcatcgcctgcagtgtgctcattaagtgcaagggtaatgtctgaatctaagttagtgccgtttattactccttcgttatctttaactaaagctgcacggtcaaaactattggcttttatgatattcacaacggccgaatcacccgaactattaatagcgaaaattcttttttttgatggttgataggcaacaatctctgctgcaccttctgggctttctgcattgagcaccgcacggccgataagatttatacttaacgctgaatttgcgtcttcaccactcgctccatcttgccctgcaggaccttgctcaccttgcataccatctttgccgtcgtcaccgtctaatgagcaacctgtaagaatggttaaaagtgatagcgcaataattgatctttttaacattattattttccttcgtattgtattaacgcaattacaacacgcaggcattacaactatatggcacttttatgagcactaaattgagccataaaaaaagcgagtataaactcgctttctatataaaattagtagggtagctcactattttttagttggacgtttccaaccagttaaattacgttgtttaccacgagcgactgcaagctgttcgtcttcaactgtattagtgataacagaacctgcgccaatcgttgccattgagccaatatttactggtgcgactagtgatgagtttgaaccgataaaggcgttatcaccgataatggtttttgatttatttacgccatcatagttacaggtaatagtccctgcgccaatatttactttttcaccaacttcagtgtcgcctaagtaggttagatgatttgcttttgagcctttacctaagcgagtttttttcatctcaacgaagttaccgatatgcgagtcttcttccataatcgcaccagggcgaagacgagcgtaaggccctaaagtacatttagccgcaacactggcttcttcaacaagcgagttagctttgataacaacgttatcgccaatagtacagtctttaagtacgcagttaggaccaatctgaacattattgccgattgttactttgccttcgaagataacattaacgtcgattagtacatcttcaccagtcgttacttcaccacgtacatcgatacgagccggatcagcaagtgttgcgccgtttagcattaactcttctgcttgccacgcttgatatgcacgttcaagcgctgaaagttgtacgcgattattagcgccttcaacttccatcggatgctcaggctgtgccgaggtgatttcaacaccttcactatgtgccatcgcaacgatatctgttaggtagtactcaccttgggcattgttgttagataagttacctaaccaacgttttagtaactcaccattagcagccataatgccggtgttgatttctttaatttcaagttgctcaggtgaggcatctttttgctcaatgatacctaccagcttgccattttcacgaagcatacgaccataacctgatgggtcatctaaagtcacggttaatacagctaggccttttttaggtgtcacagcaagtagcttttctaaagtggcgcgttttgttagtggcacatcaccgtagagaatcaatacggtatcgtcatcggcaatatgttctttggcaacagcgactgcatggccggtaccaagttgctcttcttgtaatacccaatttacttgattgtgcgatagggcagcttgtagctgttcacgaccatgaccataaacaaggtttgtttcgcgagcaccaagtgcagtggcattatcaataacgtgctgcaccataggtttacccgcaactttgtgaagtacctttggtagagcagagcgcattcgggtacctttacccgctgctagaataacagtagtcagagacattaaaacaatatccttctttctttgttttaggtgtgcatgatgttgtgagatctgaaaaaacaaacaaagttatgtaagtcacatcatgtgtaaatacgcaatcctaatgtgtaggactgaaccttgaatgaaacagctattcactattaattcacactattgtagcgagctttgatgaaggatataagtataaaaatagaatagggtgcaaagcatcgcatttcaggcacaaaaaagcccacgttaagtgggcttttcgaaaaccgagtaggcttactttttgcgtaattgttgaattacgcgaagttgagcgattgcttcagcaagctgtactgcagcttgttggtaatctaactcagcagctgacgtgttcgccatttgctcttcagcatcacgtttcgctttttcagccgcttgctcatctaggtcttcaccacgtactgcagtatctgcaagaattgtgatgcgatccggttgaacttctagcgtgccgccagcaatatacatcacgtcttcgtgaccaaattgcttaactaaacgtaccataccaggttttagggcagttaataatggagcgtggccatagttaacaccaaggtcaccttcactaccactcacttgaatcgattcaaccagaccagagaacaagctctcttctgcgcttactacgtcaagatgtacagtcatagccgccatactaccctcctaattacatgcttttggctttttcttgagcttcttcaatagagccaaccatgtagaacgcttgctctggcatatcatcaaactcaccgtttaagatacctttgaagccagcaattgtgtctttaagtgacacgtatttaccaggcgcgcctgtgaatacctcagcaacgaagaacggctgagataggaaacgctggattttacgtgcacgagatacaacttgcttatcttcgtcagaaagctcgtccatacctaggattgcgatgatgtctttaagttctttataacgttgaagaactgtttgaacgccacgcgctgtatcatagtgctcttgaccgattactagtgggtcaagttgacgtgaagatgaatcaagtgggtctaccgcagggtagataccaagtgaagctatatcacgagaaagtactactgttgcatctaagtgagcaaacgttgttgctggagatgggtcagttaagtcatccgcaggtacgtataccgcttggattgaagtgattgaacccgtcttagtagatgcgatacgctcttgaagtacacccatttcttcagcaagagttggttggtaacctactgctgaaggcatacgacctagaagtgctgatacctctgtacccgctagagtataacggtagatgttatcaacgaagaaaagtacgtcacgaccttcgtcacggaacttctcagccatagtaagaccagttaacgctacgcgtaaacggttacccggtggctcattcatttgaccgtatactagagatactttgtctagtacgtttgagtcgttcatctcatggtagaagtcattaccctcacgagtacgctcaccaacacctgcgaatactgagtaaccgctgtgctcgattgcgatgttacggataagttccatcatgtttacggttttaccaacaccggcaccaccgaatagaccaactttaccacctttagcgaatggacatacaaggtcgattaccttgataccagtctctaaaagttctactgaacttgattgttcttcgtaagaaggtgctgcacggtgaatagacatacgctcttcttcaccaattggaccagcttcatcaatagggttacctaaaacgtccatgatacgacctagtgtcttcgtacctactggaacgtggattggctgacctgtaccttctactgaagtaccacgacgtaaaccgtcagtagtaccaagtgcgataccacgtaccacaccgccacctagctgttgttgaacttctaaagttaaaccagctaagtcgccatctgttacttttagtgcgtcatatacggctggcacgttgtcttgtggaaattcgatatccacaacggcgccgataatttggacgaccttacctaaactcatgtctattcctctcattaaactttgccgaagcgttaaactgctgccgaaccgccaacaatctcactaatttcttgtgtgattgcagcttgacgagccttgttataaacaagctgtaactcatccataaggtcgccagcgttatcagttgcagctttcattgcaaccatacgggcagcctgttcagaggcagcgttctcaactacaccttggtatacttgagactcaataaagcgtactaacagagcttctaaaatcgcatctgggtttggctcatataagtaatcccaagaatgttgagatacttcttcttcagcttttggcaaagggagtaactgatcgattgttggctcttgcttcatagtattaacgaacttgttaaatactacgtataagcggtcaattttaccttcagagtatgcatctagcattgtctttacaggaccaataacgtcttgtagtgaaggtgtatctcctaagttcgcttttttagcgactaacttaccgccaaaacgttggaaaaagccagctgctttgctacctaaagtagtaaattcagcttcaacgcctttttctttccacgctttaacatctagggcaacttttttgaactcgtttgagttcaagccaccacatagaccacggtcagtagagataacaatataaccaactcgttttacttcacgctcttctaagaaagggtgagtaaaatcaagatttgcttgagcaacacgaccaatcacttggcgtaagttttcagcgtatggacggcttgacgccacacgttcctgcgcttttttcattttagacgcagcaaccatttccattgcgctggtgatcttttgagtattcttgatactcccgatcttgcttttaatctcttttccgctggccatgactctctctccgaatcaggtgggctttagttgcctaaagctcaccattcataactaaattaccaagtttgcgtcgacttgaacttctctagaagttctttaagttgagcttcaatctcagcgttgtagttaccagtttcattgatttgagccattagctctgcgtatgtgctgtttgcataagaaattaggccagcttcgaaatccatgattttcgcgatttcgatgtcttttaggtagcctttttcagcagcaaatagcgacagagacatttcagcaacagacattggtgcgtactgtttctgcttcattaactctgttacgcgctcaccatgctctaattgagcacgtgttgcatcgtcaaggtcagacgcgaactgcgagaacgcagctaattcacggtactgagctaacgctagacggataccaccacctagtttcttaacgattttagtttgcgctgcaccaccaacacgagataccgagataccagcgttaacagctggacggatgcctgagttgaataagtcagtttctaagaagatctgaccatcggtgatagagataacgtttgtcggtacgaacgcagaaacgtcgccgccttgagtttcaatgattggcaatgccgtcaatgaacctgttttacctttcacttcaccgttagtgaacttctcaacgtaatcagcgtttacacgtgatgcacgctctagaagacgtgagtgaaggtagaatacgtcacctgggtatgcttcacgacctggtggacgcttaagtagtaatgagatttgacggtaagcaacagcttgcttagataaatcatcatatacgattagcgcgtcttcaccacggtcacggaagtattcacccatagtacaaccagagaatggtgctaagtactgaagtgccgcagattcagaagcagatgcaacaacaacgatagtgttttctaatgcaccgtgctcttctaatttacgtactacgttagcgatagtagatgctttttgaccaactgcaacgtacacacatttaacgcctgtacctttttggttgatgatagcatcgattgctaatgcagttttaccagtttggcggtcaccgatcacaagctcacgttgaccacgacctactgggatcatcgcatcgatagatttataaccagtttgtactggctcatctactgattgacgttcgataacacctggtgcgattttctcaacaggttcaaaaccgtcgttatctaaagcgcctttaccatcgataggtgcacctagtgtgttaacaacacgaccaagtagaccacgaccaacaggaacctctaggatacgaccagttgatttaacttttacgccttctttaaggtcagcgtaaggacccattactactgcacctactgagtcacgctcaaggtttagtgcgatagcataacggttgccaggaagctcgatcatttcaccttgcatacagtcagcaagaccgtggatgcggatgataccgtcagtaacagatacaatagtaccttcgttacgagcttcacttacaacttcgaactgctcaatacgttgtttgatcagatctgaaatttcagtggaattaagttgcatgctctttttcccaattacgattgtagtgatgtagctaagcgggctaatttgccacgtactgagccgtcgattacagtgtcacccgccttgataataaggccgccaaccactgtagtatcttcactacaattcagcttaactttgcgtgcgaaacgtttttcaagtgccgctaccaatgatacttgctgctcagcagcaagcggtgttgcagaaaccacatcaacgtcgatttctttgtcgtagtccgcttttaattcagcgaataactctgcaacagctggcagtgcaactaaacgtccattttcagccatcaccttgattaggttctgaccttgttcgttgagctgctctgcacagatcttgataaacagatctgctttttcagtagcagtaggcaatccagctagcgcggcagcggcttgctcattgctggcaacttggccagcaaagaacagcatgtcgttccaactttcaacagtgcctttttcaacggcaagttcaaaagccgctttagcgtatgggcgagcgatagtagccaattcagacatgctcataccctcctaattacagctcagcgacaagtttttcaacgatgtcactgtgtgcggcttgattgatttcgcgctctaaaatcttctcagcaccaaccacggccagcgtcgctacttgtttacgtagttcttctgttacacggttacgctctgcttcgatttcagagtgcccttgagcaataattttttcacgctcttgttgaccacgaacagtttcttcgtcaacgataagcgtggcacgctttttagcttgttcaatgatatcagccgcttgagcttttgcctctttaagctgctcagcagctttcttttgcgcaagttctaagtctttttcggctctatcagaggcagctaaaccatcttcgattttcttctggcgagcttcaattgcaccatttagtggtggccatacgtatttcatacagaaaagtacgaaaaccgtaaatgcaattaattcaccgataagagtggctgttaagttcacgaccgctcctccttaaaatagtaagctgttcaaaaaataatattaaagtacgaacaacaataccattgcgataccaacaccgatcatagctacagcatcgattagaccagcaaggatgaacatcttaacttgtaatgaaggtgcaagttcaggttgacgagcacaagcttctaggaatttaccacccatgttaccgaagccgatagcagtaccgattgcaccgaagccgataagtagagcaacagcgatatacttaagaccaatcattagttccatttttttctccaaagtttcaattgtaaattaaagttaaaatttaaaagtgtataaaattagtgattatctgagcttgccatgcttaggtaaacgattgttagcatcatgaatacgaatgcttgcagtacgattactaagatgtggaatacagcccaaataaagtgcaacggtagttgcattaaaccaactgcgccgatcaagatgaaaatcaactcaccagcatataagttaccgaataaacgcagcgctaacgagaacggcttagctactaaagcgattgtttctagtaataagttacacgggattaaaaacaccatcgctagcttgttattagagctaaatgggtgaagcgtaagttctgctaagaaaccgccaatccctttgattttgattgcgtaaccgatcatcagaatgaatacaccaatagcaagtgcagcagtcatgttgatgtctgttgttggtacaatcttcatgtaaacgtcgtgagaatccataccgaatgcttgttcaccaacgaagccagcgaatgcaggtaggaaatcaaccggaattaagtccattaagttcattaagaacacccaaacgaaaatcgttagagctaatggagcgattagggcacttttaccgtggtaagtatcgcgtacgttgtcgccaacgaactcaacgatcatttcaatgaaacactgaaatttaccaggtacaccggtatttgcttttttagcggcactacggaagatccataaaaatacaagacctaaaccgattgaccatgcgagggtatctatattccatgtccagaaaccactgtctgcacacgctttgttgaaggcaagaccagcgtcggtcgagcacatcttagcgttagttaagtggtgctgaatatggcttgatagagttacttcttctgcagccatgttatatcccaaaagttaatgattaaaaaaaacgggcgcaaacaatccgcaaaataacaccaatacataaacacagaaaaacggtaacaaaatgaccgtgtaagacttcagtatcagtgcgaacaacacgattgttagcataaattttaatccgttgccgcgctttagcgaggcatacacttgatttactcgacttgcacccacatatctgaatgcatagacggcaaatacaaaattagggagtattgctacagccccgccagcaactgctgactggccggcattgactccccaacctataaaaacaactactgcagcgatgagcgctacgataccctgaagacaaattaatttaaatgcggcaagcctataaggctttgctaacttattagtcacgttttattaaccttgtaaacgttcaaattgtcagggtatgaaaactggcgaaattatactgattcctaccagttttgcaacttgagtcgaccctttgtagtgcaaaaacaccacaaatgtctctttttggacatgttattaattaatgacgggaatagtcttaatttatacggcttaaaatgccatctagctcatcaagtgttgtatacgaaataaccagctttcccttgccttttttattgtagtttatttctacttttgcgcctaaattttcagcaagtttttgttctaactgtttgacatcaggatctttttcttgcacttctttttttggcgctggttctaaaatagaacgcactagcttttcggtttcgcgaacagttaacgctttagctactgctagtcgtgctgcatctgattgcgcttcaccttcaaggcctaataaacagcgtgcatggcccatttcaatatcaccatgttctaacaatatttttacatcttcatttaaattatttaagcgaagcaaatttgttactgttgtacgagacttgccaaccgcttcggcgacctgttgatgggtaagttcaaactcatttagcaaacgatttaatgcaatcgcttcttccatcgcatttaagtcttcacgttgaatattttcaataagtgcaatagctaccgcagcttcatcgggtacatctttgatgatacacggtacggtgtctaattttgctaattgtgcagcacgccaacgacgctcacctgcaataatttcgtatttatctgcaccaatttggcgcacaacgattggctgaataataccttgggcacgaattgagctggctaactcttcaagtgcttcttcagacatgtctttacgtggttgatatttacccgattgtaaaaactctatcgctagcttttgcagttcaccatttttttgctcagcaactacctcagagacttgctctggtgtggttgtcgcttgttgctgattatttgcactttgggctggttttgatgaacttaataaagcgtcgagtcctcggcctaaaccgcgttttttagcagacatgttatttttttacctcgaagttaggctactgctgaagatgttttctcttttctacgtaacatttcgccggctagggctaagtatgctttagcgccacttgatgcacggtcataatacatggcaggggcaccaaagctcggcgcttctgctaaacggacattacgtgggataacggtacgatatactttatcgccaaaatgttgttttagttgttcagatacgtcatttgcaaggcgattgcgcggatcatacatggtgcgcaaaatcccttcaattgttaacgctggatttactaacttagaaagttgcgtaatggtatccattaacgccgttaaaccttcaagggcatagtactcacattgcattggaactaaaattgaatctgcggcagccattgcattaacagtcagcatatttagtgaaggcgggcagtcaataaaaatgaagtcgtattgatcttgaattttttctaacgcattacgtaaacgtacttcgcgagcaaacaattccattaatttaacttcagcggcagtcacatcaccattagcagcaattaagtggtactcaccagaggtttccttattgatgacttcttcgattggtgtctcttcaatcaataaatcgtaaatagtcgcaacatcaccatatttatcgacaccgctccccatggttgcgttaccttgcggatcaagatcgattaataacactttacgcttcgtcgcggccatcgatgccgcgagattcacagcggtggttgttttaccaacaccacctttttggtttgctaatgcgatgacttttgccacagtgctctgatccctagtctttagatagaatgattagatgtctttgcgcatctaactcaggtacttccaagctgattttttcgtcaaacttaatacctttaggtaatgagtctagttcttcgctcggaaatacgccttttaaagcgataaatttgcctgaatgatcaatcaagtgcgcacaccagtcaaccatatcttgtaaagaggcgaatgcacgacttaatacaccatctaatttaacacttggttgatattcttcaactctagactgcactggggttacattttcaaggccaagtgcatgttttacctgcatcaaaaagcgtacgcgcttacctaaactatctaacaaaataaattgcgtatcaggtagggcgatggctaatacgatacccggtaaaccaggacccgtaccaacatcgatgtaatgtttgcctttaaggtgtggtgcaacaactaagctatccataatatgcttaaccatcatctcttcaggtaaacgaacagaggttaaattatacgctttgttccacttgtctaataattcaacatattgcacaagttgttgttgctgtttttctgttagcgcaatttcagtttgcgctaacagtgaagttaattgttgttgtaacactgtattcctcaccaactacgcagtcttgcgcagtaagccttgctttttcagatagactaataatagcgaaatagcagcaggggtgatacctgaaatacgcgatgcttggccaattgtatctggacgactatcagtaagcttcgcaataacctcatttgataaaccagaaacagttgaataatcaaagtcttttggtaatacagtttgttcatgacgcaattgcttattgatctcgtcttgttggcgagcaatgtaacctgcgtatttagtatgaatttcaacttgctcaagtgcagcttggttatcaaactcagaacctaagccatcgatcgccattaaatcggtataacgaatttcaggacggcggatcagatcttcaaggctcgcttcacgagtcagtggcgtttttaataacgcatttacttgatcgacagcaacgtgatctttgtggatccacgtttcttttaaacgttgagtttctttttcgatgatttccattttttcgttaaaggcagcccaacgagcatcatcaactaaaccaagttcacgaccttttgcagttaaacgaatatcagcattgtcttcacgaagtaataaacggtattcagcacggctagtaaacatacggtacggttctttagtacctaatgttgctaggtcatcaattagtacgcctgtgtatgcttcatcacggcgtggtgtccaagactcttttccttgtacttgtaatgccgcgttcataccagcaattaagccttgcgcgccagcttcttcataacccgttgtaccattgatttggcctgcgaagaataaaccattaataaacttagtttctaatgactgttttaagtcgcgcggatcaaagaaatcatattcaattgcgtaaccaggacgacaaatatgtgcattttcaaaaccagtgattgattgcacaatttcaagttgtacatcaaacggtaaactcgtagagataccatttggatataattcgtatgatgttaaaccttctggttcaacaaagatttgatgtttgtctttatcagcaaaacgtacgatcttatcttcaattgaagggcagtaacgaggaccaataccttcaataacacctgaatacataggtgaacgatgtaggttgttgcggatcacatcatgagttttttcatttgtataggtaatgtagcacgggatctgctgtgggtgatctgactgtttacccataaacgagaataccggcgttggagtatcacctggctgttcttgcatcttgctaaaatcaacagtgcgtgcatcgatacgaggaggcgtgcctgtttttaagcggtcaacacgaaatggtagttcacgtaagcgctctgcaagtgcaattgaaggtggatcaccagcacgaccccctttgaaattctctaaaccaatatggatctgaccacctaagaaagtacctacagtaagtacaactgatggggcactaaaacgaagacccatttgtgttaccacacccattacacgatcgccttcaacaatcagatcgtcacatgattgctggaagatctttaaattttcttgatgttgtaaagtgtgttggatagcggctttatacaaagcacggtcagcttgcgcacgtgtagcacgaacagcagggcctttagatgagtttaaagtacgaaattgaataccgcctttatcgattgcttgtgccatagcaccacctagagcatcgatctcttttactaaatggcctttaccaataccgccaattgccgggttacaagacatttgaccaagggtatccatattatgagttagcaatagggtattcatgcccatgcgagcagatgctaatgcagcttcagtacctgcatgtccaccacctacaacaataacatcaaaacgttcgtgaaaaatcatttatgggatcctacttaatcgaccagcaaaactttgtaaagggagcgtattctacctagaaatttagagaagataaatgattaaacagtactcaagatctaagtgggtgatctctaataatataaaggatcttttaaagagatcttttattatttttactactagtaacggctagatctgttgataatgtttgctttactatttaaaacatgatcttaacgcagatctaaaggtgttaatatgatcggatcttacggggaacaagctttgatcaaaagggctatttatacacagggcaatatcgagtggatcttatccaagggataaactaccttaaaatcgcagttagatcagtgtttatccacaattcgatctaaattatcagtaaattgttgataacttttaaaacacgatcatcatcgatcggcttaattaagtcccaccgcttcgatccagcttggcaaccaagccaatgctgtgtcctcgggtagttcttcatctagaatattaagctctaagcgcgttgccacccgtgttgcacctttacttgctaataactcatctaggttacgagcagcatagttataagtgtcgtaactggtgtcacccaaaccgatcacactgtagtttaattcttttagatcaacttgttggttaactgattcaataaatggcaataaattatctggatagtctccggcgccataagttgaagtgcataacaaccagattgtgtcttgctgatcaatatcatcaaataccggctgctcatgcagcttaacttggatcccttgttgttcaagggcttcagcgagctgttctgccacgtactctgccgatcccatttggctgccaacgatgatatttactgattgcatgtgtttgatcatgtatagaaataagtggccacatgataacgaacttaggatgtgagtaaagcgttgaattacgatctgaataagtttttatggttaaaatacgtgcttaaacttatttgtttttacaatttgctgtttttaatagtttttttaaatttttagcgaatttaaccctttgatcaagctgttaataattttggggaaagttctgatcaagtttgattttgtaaactgtataactttgctaagttattgatctttagtcgtcgcaaagagaaagattggttagatctgtaagtcgtgctgagtgtgatcgttttgtggatagatcgcttgttgataacgatcggtttgtaaattgtgatcaataaaatagatcgaaaaaaacttaaaacagcacatataaaggccgtttttaagaaaattaattataaaaaatggctgttgatcatcagcgagctcaaatatcagcgattttttatgatcaaatcagctttcagatctaaaaatatcccaaatgtggataacatttttagccaaactcgatcttaaaagctgttttgatctgatttttttgtttaccaagttaactttcgagctgaattaaggtgcttttaattgtattacccactagatcatagagcgaattacccaatgaaaaacgtttagcgccaccagcgaaagccgcttttgctgagttaaaattgcttattgccatcacatttagtggcatatctatcgcgtttgttaagctggttatttgctctatgtttgtaaggccaggtacaaatagaccatctgcaccagcattttgataggcttttgcgcgttctaatgttgcttgaaaagggcgatcactaacaaagaaggtatcggttctggcgttgataaataaactaccgaagccattttcgttaagtactttctttatctcactaataatggtgcattgctgttcgatagatctcagtgcattagtgtctttgtttgagtcttcaatgttgatacctacaatccctaatcttgctaacgctaaaacgttttggctaatttgcagcggatcgttactgtagcctgactctatatcgacagtgagtggaatgtgtatgtgtttagtcaagcttttaaccagcgctaattgagtttgaaaagagatgttttcaccatccgctaaacccaagctggcagcaatgccccagctggttgttgctagggctttagccccccgcagcttgaatgaattgtgcagaactaagatcccacgcattagcaagtacaaagcctgttggctggtggtgtagttggtgaaattgttgatatttgtccatgatgtcctccgtttaatgacatcactagactaattgaaactgagtttaatactggctggtttcggccctgaaccgataattgattgctggattaaaaataaaaaagagccttgcgactctttttataatattgatgaccggaatttatttaccgatacagaacgaactaaagattttccctagcaagtcatcagaagtaaattcacccgttatctcatttaagaactgttgagttaggcgtaactcttcagccaagatctcaccagcaatatgcatctctagttgctctttacctgtgtttaaatgataggctgcgtggtccagtgcgtctaagtgacgacggcgtgccatgaatccaccttcagttgccccttgaaaacctatacatgcctttaagtgagtacgaactaactctataccttcagcatttttagcacttaaacggatcacaggatattgatcatgctcatccataccgacactttcgccggaaatatcggctttattacggatcacagtaacacccattccctctggtaacttggccataaactctggccaaatatcatggggatcagtggctgatgtatctgtgccgtctaacataaatagtacgcgatcggcttggttaatttcgtcccatgcgcgctcaataccaatttgctctactttatctgggctttcacgtaggcctgcggtatcaataatatgcagtggcataccatcaatgtggatatgttcacgtaatacgtcacgtgttgtacctgctatttcggtaacgatggctgcatcacggccagctaatgcattgagtagacttgatttaccagcgttagggcgacccgcaataacaacacgcataccttcacgcatgatgctaccttgtttagcttgctgagttacattatcgagttgatcaataatggcatcaagatctgctgaaactttaccgtctgataaaaagtcgatttcttcatcaggaaaatcaatcgcggcttctacatacatacgtaggtgaatgactttttccaccagcgtttcgatatgtttagaaaattcaccttgcagtgattgtagggcgctttttgctgcctgttcactggttgcattgataaggtcagcaattgcctctgcctgagttaaatcaagcttgtcattcataaatgcgcgctcagagaactcacccggttttgctaaacgtacaccgtcaatttggctaatttcttttaatagcatatcaagtacaacagggccgccatgaccttgtagttcaagtacgtcttcaccggtaaatgaatttggcccttggaagtaaatagcaataccttggtcaagctgttcaccgctcaagcttttaaatggcacatagtctgcgtaacgtgttttaggacaacggccaataatgtgctctgccactgttttagctaagctgccagagacgcgaataataccaaccccaccacgtcctggtgcggtcgcttgtgctgcaattgtgtcttgattaatcatgcgatgaaataatgccactaaaagaatgaatgctggctctattgtaacctatggcttaatttcatgcgaatagctgtttgagtaatgaaatagcaaaagtttgatgtaagtaatactttatttagctttaattaataataaatcgccattgcaaatgataattatattcattaccatattgcgcattctaaatcttatcgttttttattatgcgtctttctgctgtttttattgcacttgctgctggtttttcgggcgttgcccatgctcaaactgaagtgactacttctgatcaaaatgattctaaagaactcgaaaaaatagaagttgttggccgtgcgttttctttatatcgaccaactgagtcaagttttgcaactcgtactaatacaccgttagaaaaaatacctcagtcaattcaaattttgccgcaggagctgattaatgatcaggctgctcgccaaattaccgacctttatagcaatattgctggtgttaatgcctttagttattccggcgtgacatttcgtggttttcgccaagatgagattttatatgatggcgtaaagggcgaccctttcaatggttttgctgtgccgcagttatttaatatcgaacaagttgcggttttaaaaggccctgctggcgccatttatggtagcggtaatccgggcggtattattaactatgtaactaagaagcctaaattcactagtgagcacagtattgaagttgaagtgggtaatgatgatttcttcagtggtgcattagaaagcactggaacgctgagtgaatcacttgataaccatgcttatcgtgttggtatctaccgagatactgaaaaaccattccgtgcaaatactagcagcgataataccattgttgatcttggatatacgtggcttataaatagtgcaactgaattaaccacgcagtatacctatatagagcaggaattgggtggggcacgtttacgtggtgtacctgctgatgataatggcaattttctaactgatattagctggaaccataacgaggcaacagactttcaaaatgttgaagcgcatgtttatcaggcgactttaaaacacgattttaatgatgtttggcgtacagatgtcacggcacgatattttgataacaaagaagtgcaaaactaccatgagccaagaggtctagtagatactaacgacgacggtattgttgattggagtcatcgcgagtttcgtgatcaagtacgtgaaaacaacggctttagtttaactgccaatgcgattgcggagtttgcatttgccaacatgcagcatcaagtactgtttggtagtgactggtatgaacatgattttgaaagtgtttaccgtacagctacgcagcaaagtaaaggtggtccagttcctggtcttgatcttaacgatcctgaatatggtttaacctctgccgatgattatgatcttgatagtattacaccaaggcttgggaaaacgaatagcacccgctttggtgcgtacttgcaagaccaacttgatatcaccgctaattggagcgtcacagctggcttaagatatgaccgttttgaagataaagatctgttaaatcaaaccgagttttctgatagcgatttaacttaccgtattggtaccagctataacattaacaatatgttcttcccttatgcactgcatggcactggctttgtgccgcaaagtgccagtgatcaagaaactgcgaagggtggccctttctcgccagagactagccgtattaatgagttaggtttaagaaccaaattattagatgacacgcttgctgttaatatggctgcatacgatattgtccgtgaaaatatcctgcaacctagtttattaggtgatgttgcgggtgatggtgttgatgacttagttgccgttggtgaagtacaaagtaaaggttttgaactcgaagtagtgggtgacatcactgagcgttgggtggttactgcaagctatgcctataatgatacccgtattactaaagcaaacgacagcattcgtaaccaaattcctgatagcgataaatttgccaacgcgccgcaaaataccctaggtatctggacacgctatgagttacctagcttatcgtcatctatttctgctggcttagattatgttgatgaacagcttagtttaggcggtcaacgtgttaaaccttatacgatttacaacatggcgtggcaaacaaccgttgataactggcaatggcaattatcagttaaaaacctgtttgataaagaatacgcaagcagtggctttattgagcgaacagggcactttcctggtgaaccacgccgtgtctatttaagtgctaaatacagcttttaatggtggcgtgtgaacgctaaaagttggtttaatttacattcctgggcaggactctttgttggagtcctgctttttgttacctgcgtatcggggacactcgctacgttaagtcatgaactcgaatacttaacagacgctaagtatcgtgctttatcttcttcagcctcgactaactatcaggctatcgaaaacaccctaaataagcattatccacagggtcaattactttatatccaacgtcataaacaagattaccttgccactgaagcggctcttaaagtcggtgattcattccgttttgtttatttagatgctgcaacgggccgcttacttggtgaaggagagtgggcgcggatatcgcggtttttacgtaactggcatatgaatttgtcgatgggctggacgggtaaattaatcgttaccagtttgagtatgttactcgttattttattggtttcgagtttttatgtgtatcggcgctggtggcaaggttttatgaaaaagcctgctgcgcttagtcttgataaacgcagtagttgggctgattggcacaaactgttagggctttggagtttatggtttatcgcagtgatggccattacaggtgtttggtatctggtagagcatgggctgcaaacagctaaagtgtcgcatactgtttctgcgccacaagcggtaagtgagtttaaaaaacaaagccctcgtaaagatatatcgccaattagcttaactgcagcttatgaagccgctcaacaggcgtttccgagccttgatattcgctatattcgttatccaaataaagcggatcagcctattgaagtgcgtggttataacgatgatattttactgcgtctgcgtgctaaccgtgtttatttaaaaccaagctcgggtgagttactaggtatacaaataggcgaacaattacctattgtagcccgaatttcagataccgctgatccgctgcactttggtaactttgcaggagttggtactaaacttatttgggggttatttggtgcattgatgagctttataagtgctgctggcatttatatgagttggcttagggttaagcgtaaaacaacagctgtaaagtggcttggagtatctggagggattgcaattggtttggtggttgcttcgctactaacaacaagtttgagctttactgagcgcagtgtgcctaatcaggtatattctcctatcctcggttaaattttttcaggtattaaaaaaggcgctaattagcgccttttttgttgggttaagagtttagcctcttaccttaataccttttttctccataccgcggtagatgatgagcatctgtgcgattgagataaggttcgatactaaccagtaaagtactaggccagatgggaaccataagaagaaaattgagaatactactggcataaaggtcatcattttttgctgcataggatcagtaactgtcataggttgcagcttttgagtgatgaacatacttaaaccaaataaaaccggtaatacgtagtatgggtccattgatgataagtcatttaaccataaaatgaattcagcatgacgtagctcagttgattctaagaatacgtagaataatgctaagaagattggcatttgtagtaacagtgggaaacagccacccatagggttcactttttctttgcggtacatttccatcatcgcttgaccgaatttttgacggtcatcaccatacttctcttttagtgcagccattttaggctgtaaggcacgcatcttcgccattgacgtgtattgtgctttagtaagcgggtacattgctgttttaacgataaccgtgattgcaatgatagctagaccccagttacctaggatgctgtgtaaccacttaagtagtacgaataatggttgtgagataaaccacaaccaaccatagtctacagttaggtctaagtctgggtgaatcgcttctagtacatcagactctttcgggcccatgtagtaagtagaagtaagtgtcgcttgcgtacctgcttgtacgttaactgcttcacccttagtaccaataattgccgcattaccagctactaacttgctgtagagggtattttgttgatcttgcttaggtacccatgcacttacaaagtagtgttgaataaatgcaatgtagccaccagctgtggtgatgttaaggtttttatcagccatatctgagaagctatacttttcgtatggctcttcttcagtaccgtatgctgcacctaagtagttttgatctactaagctacctttttcttgtactgtgcgttttacttgcgtgtataactgaacttgaattgggtcagctgttacgttgtttactgtgtactctaaacctacagcgtagtcgccttttctgaagatataggttttagtaaacgtcacacctttgctgtcggtaaactcaagtggtacacgcagttcatcaccatttaaagtgaacgttttttgagtggttttataaacagggcgaccagcaacagttgcatctgggccatttaaaccaattaagccactttgtgagaagtattggttgccatcaaactcaccaagtagcatgaaaggggtatcactgccttttgtctcttcgtactgaagtaggtctgcttcaataatgtcaccaccacgggtgtcaattttaacagtgtatacatcagttgttacatcgataactgagcgctttgctgttgtagcagctggtacttcaccgtcagatgatgctggaataaagtcatcagattctggtgtagttgcgcctagtgtttgtgttgtggcacttggatcagcttttggtgcattgtagtcgttattccattcttggaataataaaaacgacacaagcatcaagccgattaataaaaacgtgcgttgcgattccataacagctcttatttctcgtgttggtggttaatatgattttttgccggtacgggatcatccccaccagcatgtaaaggatggcattttaatatgcgtttaacagctaaccaactgccttttacacttccgtgcaaattaattgcttgaattgcgtaactagagcaagttggattaaaacgacaatgcgggcctaataacgggcttatccatttttgatagcctcgaattaacatgactaaacagcgctttggaatagcaacaagtggtttaagtaacctcatgatgtgtcagcccctgcgttaatttagtcaatggataccatgaatttaaattcctagcgaagaattttaaatgcatgattaaaaggtgagctaaagataccttaattaagcctgtaattctattgctatcaagcttgattattagaattagctgatttcttgggacgttttttgaatggtggtggttttggcgcacctggcttgcagcgctcatttatttttcgccacaatttattcagttgttttgtcagctcttcgtttgactgttcatctataccacttttaaccataagcacaatatcaatgttatcgagtttatgttgatttaaacggaaactttcgcgagcaagtcgtttaattcgattacgttgacaggcttttttaacgcgttttttggcgaccgtaagacctaatcgaggattagtttggtcattgcgtttagctaatagggtaaagaaaggagtcgcagcgcgtgctggttcattaaagattcgagagtaatgcgagggagttaacagacgtaactccctgctgaagctaaagtcttccacttatatattaagcagaaagaactttacggcctttagcacgacgacgagctaatactttacggccatttgctgttgccatacgagcacggaaaccgtgtgtacgtttgcgttttaaaacgctaggttgaaaagttcttttcataacaattccatccgatcggttaaggttaaaacatcctatgcaggtcgcgatcctggcacaggtgccattgcgagcgcgagatattatagatgaagacaacaaaagtcaatcattaaaacgctgcagaggccgtaattataaaggatcttattttgtgatcatataggatcatcataaataagaagttttccacagcctctgtataaaaagtgaataaaagcttgggaaaagcgaattcgatcgtagaatttgatcgcgatctgccccttaatttgctatgatcactattcggagttaaaaaatattttatataataatcaatggtttattattttctttgtgcgagatcatattttaaataaaaatcaatcttgtacttgtggataaagtaccttcataatagtcggtcttggccagaaatattggtcaaatattagctataaatgtttgattttccatcattaaagatgaacgggaataataattaaatctctgggagtttaatagtgtatctgtcggtttggcaaagttgtttatatgtattgcaagatgaattgccttcacagcagttcagtatgtgggtaagaccacttcaagcagaaagtaccgaagatacgttgactatatatgcacctaaccgttttgttttagattgggtgagagaaaagtacttaaaccgtattaatgaactactcgttgaaatttgtggtgatgaagcgcctgaacttcgttttgatgtaggtagtaaaccaattttaaatgcccaagcggcatcagcaccggctgcatcagaagcaagcgcaccagtgagtgcacagcacactgccgaaaaactccaaccaaaacctgaaaaagcagcggtagagcctgcgccaaaatcaggttataaatcaaacattaaagaaaattacacctttgatagctttgttgaaggtaaatcaaaccaattagcaaaagccgcagcgactcaagtagcagataacccaggttcggcatttaaccctgtatttatatatggtggtacgggcttaggtaaaactcacttattacacgctgttggtaacggtattatggctaataagccagacgcgaaaattgtctacatgcactcagagcgatttgtgcaagacatggttaaagcgctgcaaaataatgccatcgaagagtttaaacgttattaccgaagtgttgatgcattgatgatcgatgacattcaatttttcgctaataaagagcgctcacaagaagagttctttcataccttcaatgctttacttgaaggaaatcaacagattatattaacttcagaccgctatccaaaagagatagaaggggttgaagaccgccttaaatcacgttttggctggggcttaaccattgcaattgagccgccagaacttgaaacgcgggttgccattttgatgaaaaaagcgcagcaaagtaaaattaacttaccccatgaagttgcttttttcatcgctaagaaattgcgttcaaatgtgcgtgaattagaaggggcgttaaaccgcgttattgctaatgcaaactttactggtcgtccaatttcgatcgactttgtaaaagaagccctacgtgacttacttgcgctgcaagataaactggtaacgatagataatattcaacgcactgttgctgagtattatcgtattcgtgtgtcagatttactatcgaaacgccgtagtcgttcagtagcaagaccacgccaagtagcaatggcattatcaaaagaacttacaaatcacagtttacctgagattggcgacgcctttggtggtcgcgatcatacaactgtattacacgcttgtcgtaaagttaaatcactacgtgatgaaagccacgaagtgaaagaagattatcaaaacttaataagaaccttgtcatcttaaggccgactttattatgcaaataacaatatcaagagagcaatttttaaaacctttagttcaagtgtctggtgcgattgagcgtaagcacaccttaccgattttatcgaacgtactgttagttgtagaaaacgggcaactttcgatgacgggtaccgatcttgaaattgagttagtggcgagtgtgtttgttggtgaagacacatctgatacaaaattaaccttgccggcaaaaaagttactcgatatttgtaaaagtttacctgatggctcagaccttactttaagtagccaagatcaccaattgctactaaccagtggtaaaagccgtttttctttaacaactcttgccgcagaagactttcctaatcttgagcagtgggatggtgaagttgagtttcaactgactcgcttagaattacgtaagcttcttgaaagcacacatttttctatggcgaatcaagacgtacgttattacttaaatggtatgtcatttgaagttgataacactgacataaaaacggttgctacagatggccaccgtttagcgattgcacaaaagcaattaccgcaatctttgaatacacaacgtcagctaattattccacgaaagggtgtgcaagagattatgcgcctaatggtagctgatgatgagttagtaaccattcaatttggtgctaatcatattcgtattattgatacagagttcacatttaccagtaaacttgttgatggtcgttttcctgactatcgtcgtgtattgccgcgtggtggtgacaaagtgattactgctaatcgtgagtggttacgcagtgctttccaacgtgtgtctattttatcaaatgaaaaatttcgtggtgttcgtttaaatctgtctgaaggtttattaaagattacggcaaacaaccctgagcaagaacaagctgaggaagtagttgaagtaatgtatcaaggcggtgagctagaaattggttttaacgtttcatatgttcttgatgtcttaaataccctaaaaacagaagatgttacttttacacttgctgattcaaatagtagtgcattaatagaaggtgctggtgacgaagaagcaatgtatgttgttatgccgatgcgtttatagactttatgagtttaagtcatttaagcctcaataattttcggaatattgaggcgctgacactcgagccagtaaatgggattaatattatttacggcgagaatggcagcggaaaaaccagtctccttgaggctatttatttcctttctcacggtaaatcatttcgtaccgccaagcacaaaaatatcattcagcatcaacaagacaagtttgtgatccacggtcgtaaagcattacatgatttgtctattcccattggtataagcaaaaaccaagcgggtgaaacatctttaaaaattcaaggtaaaacgagtcgtaaaatatctgaattggctcaattaatgcctgttcaagttattacgccagaaagttattccttgttttttggtggcccaaaagagcgtagaaaatttctcgatttgggattgttccacgtggaacatgacttcttttatttgtggcaatcttttaacaaagtactaaagcaacgcaatgcattactaaagagtaagcctcgagattattttcaacagatcaagttttgggataaagaatttgttagactagctgaacaaataaataatctaagaatcgcgtatataagtaggtttaagcagcaattttttgataaaatgtgtgcagaattaacgctagtaagcgatttacaaattaacttcaatgcgggttggaaagagagtgaaatgctctcagaagctcttgagcaaagctttgagcgtgatgccaagcaaggtttcacaagtaaaggcccgcataaagctgattttagttttagcgtttctggtaatagcgtagaaaatacattttcgcgcggtcaattgaagctattgctttatgcgttaaaagtgacgcaaaatagcttaattgagtcagaaacaaataagcaatctatattgctaatagatgacttaccttcagagttaggtgaagatacaaaagaaaaagtgggtcaacttttgacacactgcgattcacaactttttatctcatcgattttatctgaaagtatttctgctgtggtggaacccatgcaacgagaactaaaaatgttccacgtgaaacatggcaacctaataacaagataagtgggattaaccatgtctgagaattacgattcgtcgagtattaaagtactaaaaggattagacgcagtaagaaagcgtccaggaatgtatataggggacaccgatgacggtacaggcttacaccatatggtgtttgaggttgttgataactctatcgatgaagccttagctggtcattgtgatgatatttttgtaacgattcacttagacggttctgtctctgtaagagataacggtcgtggtattcctacgtcaattcatgaagaagaaggtgtatcagctgccgaagttattatgacggtacttcacgctggtggtaagttcgatgataactcatataaagtatctggtggcttacacggtgtaggtgtatcagtagtaaatgcactttctgaaaaactacaactaactattcgtcgtgaaggaaaaattcaccaacaaacttacactatgggtgtgccagatgcaccattagctgtgattggtgaagcgaatgacacaggtactgagttacgtttttggccaagcggtgaaacgtttactgacctgaatttccactacgacattttagcgaagcgcttacgtgagctttctttcttaaactcaggtgtaagtatcattcttactgatgagcgtgaagaaactaaaacagatcactttaaatacgaaggtggtattcaagcgttcgtagaatatctaaaccgtaataaaacacctgtacataaaagtgttttccactttacccatgagcgtgaagaagacggtattagtgtagaagtttcaatgcagtggaacgatggtttccaagaaagcatttactgtttcacaaacaacattccacaacgtgatggtggtacgcacttagctggctttagagcggcattaacgcgtacgctaaataactacatggaaaaagaaggctttaacaaaaaagcgaaaacaaccagcaacgcaacgggtgatgatgctcgtgaaggcttaactgccgttgtaagtgttaaagttcctgatcctaagttctcatcacaaaccaaagataaactagtatcaagtgaagttaagtctgctgtagaacaagcgatggcagaaaaactaacagagttcttattagaaaaccctgttgatgctaaaacggttgtaggtaaaatcattgatgcagcacgtgctcgtgaagcagcgcgtaaagcacgtgaaatgacacgccgtaaaggtgcaatggatttagcgggtttaccaggtaaactggcagactgccaagaaaaagatccagctttatcagaactatacatagtggagggtgactctgcaggtggttcagctaagcagggtcgcaaccgtaaaaaccaagctatcttgccactaaaaggtaagattcttaacgttgaaaaagcacgctttgataagatgctttcttctcaagaagtagcaacattaatcacagcgctaggttgtggtattggtcgtgatgaatatgacccagaaaaacttcgttatcatcgtatcattatcatgaccgatgcggacgtggatggttctcacattcgtacattattgctaactttcttctatcgtcaaatgccagagattgtagaaaaaggctttatctatattgcgcaaccaccactttataaagtgaaaaaaggtaagcaagaacgctacattaaagatgatccagcacttgttgattacttaacgtcattagctctaaataatgctgctctttatacaagcgaaggtgcatctgcacttgaaggcgaagatttagaaagaatcgttcacgattatcaaaatacagttaaagttattgagcgcttaaaacgtaaatatccaaattcggttatggaacgtttaatctatcaaagcgaaattaccgaagctgatttagctgatgaagcaaaagttaaagagtggactaaaacccttgttgacgacttaattgcacgtgatgaagatgcaactatcttccacgccggcactgagcacgatactgagcgcaacatgtattatcctgttgtgaatattcgtcagcatggtgtggataaagctcatgtactaaaccatgacttcattacatcgcgtgactataaacgcattgcagcaacgggcgtaaacattgctaacatacttgaagaaggtgcttacatacaacgtggtgaaaaaacattagctgttgataactttgtggatgcattagagtggttaatcaatgaatcgaagcgtggcctttatatccaacgctataaaggattgggtgaaatgaaccctgatcagctttgggaaacaactatggatccagctgcacgacgcatgttgaaagtaacaatcgaagatgctgttgccgctgaccaattgtttgcgacactaatgggtgaccaagttgagcctcgtcgtgatttcatcgaaacgaacgcgctacgtgtagttaacctagacgtataagcaaataatgatattcataagaaggagcctcatggctcctttttttattactgaaaaagcacaaactgcttaaaaccttactgcacacaaggtatactgagagcaattttcagactaaacgcaccagatactataagccaaatatgcaaaaatatgacgttaaaacctttcaaggtttgatcctggctttacaggactattgggcacagcaaggctgtgtgattgctcaaccactggatatggaagtgggagcagggacatttcatccgttaacgttcttaaagtcgattggcccagagccaatgtcgagcgcgtatgttcaaccatgccgccgtccaactgatggtcgttatggtgaaaacccgaaccgattacaacactactaccaattccaagtagtattaaaaccatcaccagagaacatccaggagctttatttaggctctttagctgctgtaggtattgatacgctaactgacgaagttcgctttgtagaagacaactgggaatcacctacattaggtgcttggggtctaggttgggaaatctggctaaacggtatggaagtaactcaattcacttatttccaacaagtaggtggcttagagtgctcaccggttacgggtgaaatcacatatggtctagagcgtttagcaatgtatatacagggcgtggatagcatctatgatctagtatgggcagacggtcctatgggacgtgtaacatacggtgatgtgttccatcaaaacgaagtagagcagtcagcttataacttcgaacaagcggatgttgagttcttatttgcacagtttgatcactgtgagaaagaaagtgaaaagctaatcgaagcaggcttaccattaccagcttatgagcaagtaatgaaagcatcacatgcgtttaacttattagacgctcgtcacgctatctcagtaacagaacgtcaacgttatatcttacgtgttcgtgctttatctaaagcgtgtgcacaaagttactatgatgcccgtgaagcacttggtttcccgctttgtaaggattaataattagcatgtcagcagaaaatttattagtagaaattggcactgaagagttgccaccgaaagcacttcgtaaacttgctgagtcatttgctgagaacttaacagcagaacttgcaagcttagaattagcacatcaaggtgttaactggtacgcatcaccacgtcgtttaggtttacgtgtaacagcacttgaagcaaagcaaagtgacaaggtagtagaaaagcgtggtcctgcagtagctgccgcttttgatgccgatggaaacccaactaaagcagcaatgggttgggcacgtggttgtggtatcgatgtaagcgatgcagaaacgattgaaacagataaaggtgcttggttattacataaagcacaggttgaaggtcaagcaacaacttcgcttatgagcgatgctgtaaacaaggcacttgcaaaattacctatccctaaaccaatgcgttggggtgcgagtaaaacgcaattcattcgtcctgtacacacagcaactattttatttggtagcacgctaatcgaaggtgagatccttggtaagcaagttggtaaccaattacaaggtcaccgtttccatcatccagaaaaagtaacaatcaaccacgctgatgatgtgtttgatgttcttaagtctgcgtatgttgttgctgacttcgaagcgcgtaaagcacaaattcgtgaacagattgaagcagcagctgcagctgtaaatgcaaaagtagcgatggatgaagacttacttgaagaagtaacatcgttggttgaatggcctgtaacactaacagcaacattcgaagaagcattcttagacgttccttctgaagcgcttatttatactatgaaggacgatcaaaagtacttcccgttattagaccaagaaggcaacttacttaacaagttcctatttgtttctaatatcgaaagtaaagatccaagcgtagtaattgcgggtaacgaaaaagttgttcgtcctcgtttagccgatgcacagttcttctacgaaactgataagaagaaaacgctagaaagccgtttagagtcgctagatactgttttattccaaaagcaacttggtacgctgaaagataaatctgagcgtattagtgagcttgcaggttacattgctgagcaattaggtgccgatgccgagctggctaagcgtgcaggtctgttaagtaaaacagacttaatgactgaaatggtcatggagtttaccgacgtacaaggtgtaatgggtatgcattatgctcgtcacgacggtgaagctgaagaagttgcactcgcgcaaaatgaacaatatatgcctcgcttcgcgggtgataacttaccaacaaatgtgatcagctgtgctgtcgcaattgctgataagtttgatacgctggtgggtattttcggtattggtcaagcgccaaaaggtgacaaagacccatttgcacttcgccgtgctgcaattggtgcacttcgcatcatggttgaaaaatcattaccgctagatatcttagaccttgttgctaagtcacaaacgctattcggtgaaaagctaactaacctaaacgtatcaacagatgtgtttgagtttatgctaggtcgtttccgcgcatggtatcaagatgaaggtatcgaagttgatgtgatccaagctgtactagcacgtcgtccaactaaaccagttgatttcgatcgtcgtgttaaagcggtaagtcacttccgtacgttagacgcagcagaagcgcttgcagcagcaaataaacgtgtaagcaatatcttggctaaaaatgacatcacaacacaaggtgatgtaaatgagagcctattaagcgatgacgcagaaaaagtattagcgtcacacgttgctaagtttgcaactgagcttgcgcctttatatgcaaatggcgattaccaagaagcattgtcacaacttgcgggtattcgtgagagtgttgataacttcttcgataacgtcatggtaatggccgatgacgaagcggttaaacaaaaccgtttagcattattaagccaactaagccgtctgtttttagatattgctgatatttctgtacttcagaagtaagcagtagccaattaataaaagccagctcagtgctggcttttttgtagcataaggaacagtaatgaaacgtataattactttagcattagcaggcttattaactgcctgttctagccaaatgcaaatgccaagcattgacgatattctgccaagcaaagacctcgaccgtactatgtatttacgtggtgactttactctatgggatgccgagcctcagtatcaattagagcaagttgcaccgggtatattccaaaccgaagtaaaattttcaacacctggtaaggtgtatgaattcaaagtagcggatgcagattttagtgaaggctacaactgtggttacagtgatatggacccagcagggcaatcattggttctaggccaagctgctaatgctgactgtaataccatctacaattatttcagctttaaacccgctgcaaaaggtgtgtatgtagtgagctttgattaccgcaatagtaatcaaccaaaagtgacagtaactcgaaagtaaagctctgtgctggtaggttgggtatcgcggagcgatacccaacacacactcactttgaagttagctggggtatctaactctgcaacggattattgatcgggagtgttcgatatatcgcagcagataggtatctctaacacgttgggtttcgttgctctcaacccaacctacgagctcgttacaaccctttcttcactaagtatcgatacggtgcttgctctacatcttttgccacaagtgtgtgatccataaaagtacaaaagcttgggatatcgcgggtggttgatgggtcgtcggcgataataagtaaggtttcgccatctttcattttacgtactgcgccacgcaccatcatcacaggttctggacaacgaaggccaagtgcatctaattggtgatcgggattatcaaaactcatggctgaccttttggatgaaagagacgattaataagcggctattttaactttctattgccgccagtttcaataagcgaaagcaaagcaaataaaaaaggcgcactgagcaaatcagtgcgcctttttatcaccaagatgtttggtgtgtgagctcgttattctacgcgctcaaatacagttgcaataccttggcctaaaccaatacacatagttgctagaccgtatttagcgttcttgtcttccattaggtgaacaagcgttgtgctaatacgtgaaccagaacaaccaagtgggtgaccaagtgcaattgcaccaccatttaggttaactttctcatctaccacgtccatcagacctaggtcttttaacacaggtagagattgtgctgcgaatgcttcgttaagctctgcaacatcgatatcgtcaatagtgatgccagcttgttgaagtgctttttgcgatgcaggaacagggccataacccatgattgatggatcgcaacctgcaacagccattgatttaatacgcgcacgaattggtaaaccaagttctttagctttctcttcgctcattacaagcatggctgatgcgccgtcagaaagagcagatgaagtacctgcagttacgctacctgatgctggattgaatactgggcgtagttgcgataaaccttcaacagttgtctcaggacggattacttcatcgtcttcaactaagattaaagaaccatctgcatcgtgaccttccattggcaggatttcacgacggaaacgaccttcaacagttgctgcgtgtgcacgttggtgtgaacggtaagcaaattcgtcttgttgctgacggctaatgccgtgcagcgttgcaaggtattctgctgttaaacccattacgccagcagcttgtgctacagacgttgataaaccagggtgaaaatcattaccgtgagtcataggtacgtgacccatgtgctcaacaccaccaatgatataggtatcaccagcgccagtcataattgcacgtgccgcatcgtgtaatgcttgcattgaggaaccacataaacggttaactgttactgctggtactgagtgtgggataccggctagtagtgctgcattacgagcaatgttaaagccttgctctaaagtttgttgtacacagccccagtaaatatcatcaattgatgctggatcaacggctgggttacggtctaacaaacctttcattaagtgagcacttaaatcttccgcacgcttgtttttgaatacgccgttctttgaacgacccattggtgtgcggatacaatctacgattactggattattcatgtttcttatccttccaccttatagaatacacggccttcttcggcccacttgcgagtttcatctgatacttggtaaatcgcacctaagtgagcgtacttgtctgctgttgcaacaaagttcgctaaaccagtttgatctaagtaacggaatgcaccgcctctaaatggagggaaaccaatgccgtaaattagcgccatatcagcttcttgtggtgacgctacgataccttcttgtaaacaaagtagtacttcgttgatcataggtaccatacaacggtcgatgatttcttgtttatcaaaatctttaggtgcatcagtgatagcacttagtagctcagttgctgttgcatcttgcgattttttaagacgaccgcgacggtcaggtgcatattggtagaaaccagcgccatttttctgaccaaaacgtttttcgtttgcaaatacagttactgggtctttgtcttgacgagccatacgctcagggaagccgtcagccattacgccagtgcagtggtaagctgtatcgatacctacaacatcaagcagataagcaggacccataggccagccaaatacgttttccatcactttatcaacttttgcgaagtcagcaccttcaacaactagtttgctgaagcctgcaaagtaagggaatagcacgcggtttacaaagaaaccagggcagtcgtttacaacaattggtgatttaccaagttttaatgcgtaatcaacaacggcattaattgttgcttctgatgttttttcaccacgaatgatttctactaatggcatttttggcactgggttaaagaagtgcataccgcagaagttttctggtttttcaagagcagacgctaactcatcaatacgaatagttgatgtgtttgaagttaggatagtgcccgcaggtaagtctttttcaagaccagcaagaacggcttgcttaactttagggttttcaacaaccgcttcaacaacgatatcagcaccttgtaggtctgcatcgtttagcgttggtttgattttacctaaagtagcaaccatcttatccatcgtcatgtggccacgttgtacttttttaccaagtagcttagatgcttcgcccatacctaaatcaagagcatcttggttgatgtctttcatgataataggtgtgcctttataagcagactgatatgcaataccgccgcccataatacctgcacctaatacagcagcttgtttaatttcaagctcactgtgcttagcttgcttcttcgctttacctttaatgtattggtcagctaagaaaataccggtttgcgcggcagcttcgcttgttgctgcaagtttagcaaagttagcgttttcaatagccattgcttcagcgcgttcacagtttgcagcagctttgattgtttttacagccataacaggtgctgggtaatgaccttttgtctgacccattaccatgccttcagccatcgcaaagctcataccttgctcaacacggttcattttcagtggctgtaattttacttgtcgttttgcttgccaatctagcttaccagcgatggcttgctcaagtgttgcaatacttgactctaaaagtttgtcagcactaactaccgcgtcaaatgcgcctacttttaaggcatcttcagcacggttttctttgcctgtggtgatccacgtcatcgcattatcagcaccaataaggcgcggaaggcgaactgtaccaccaaaaccaggcataatgcctaatttcacttcaggtaggccaatttttgcgttagagctagcaacgcgataatcggtagcaagtgcccactcacatccaccaccaagtgccatgccgtttacagcacttaacgttgggaaaggtaaatcttcaatagcgtcaaaaacgtcagttgcatttttgatccatgcaacaagttcttcttgaggtttagtgaaagtaggtaaaaattcgaaaatgtcggcgccgataatgaaatgatctttatcgctggtgaacaccatgcctttgatatctgagtttgttgccaattcttttaatgctaaagcgcaatcttgcaaggtttgctgcgaaagtttgtttactgagccgtcagcacagaacttaaactcggcgatgttgtccttgatgaaagcaacttcaaatgaatcgcttttatataacattattattctccctagtttattaactaagactggtacgatgagtttgcatttcaatcagtgtgcttgctttaaaatgaaaatgcaacgaaaaaattactacgctttatcgcgattgattaaaatatagctggtttgatgctaaggtgtagtggaactttattgttagttattctttaatttttgttaaaggtcatcatgaaaaaacaactccttggttggacggctgccgcattactttttcctttttttgcagccgacgccaacgataaacatgacgctttcttaaaagcagaaaaaaaggcccgttacggtgattatcaagacatgaaagaggcggcaaatgggcttaatcacccattaaagccttatgttgaaatggcttattggcagcgtaacccaagccttaagcatcaaactgaaatcgaaaactttttaaacgtttatcaaaatacgcctttagaatggcctgtgcgaaaaacgtggcttgagtacttaagacagaataataaaaaagcagcgtatattcgtaattatcgagaaaccagtaataacgaactgacctgcccatacttgagttttcaattagatttgggtgcacccgaaaaagctattatgaatcaggtcactgatttatgggtggtgggagattcacaaccgaaagagtgtgatcagcttttttccttatggaagaaaaaaggctaccaaactcagcaacgagtttggcaacgcattacattagcggctgaaggtggatcagcaagtttaattccttatttaaaaaccttgcttcctcgcaatgaacaatatttagctgatttatatttaacagtgcgaagagacccaagtgcatcagctggcttatatcgatttaaaaagaaaacagccaaagagggacaaatagcactttatggtgtgaagcgtttagtttggcgagataaagatttagcactaagggcgtgggaaaaactcgataaaatgttcacctatacggatgaacaaaaagcggatgtgtattacagctttgctttatcgctcgcttcaagtggtcataatcaagcgcgtttttggcttaacaaagtaccgaaagagcggcaaacaagtaaacttatgcaatggcagctcgctaacatgcttgaaagacaagattggtcagggatcgctgccttttttaccggtaaagaaaatttaagtttagggcagcaatattggttggcatatagcttaaatcagcgtggcgaagtcgaacgagctcgtgccatttggcaaacagtggcaaaagagcgtgattattatgggtttttagcatctgctcggttaggtatccctgtaagcttaaataacaaaggattacaagtaagtgatcaactcaagcttgaggttgcaaatgcacctggttttaaacgggctcgagcgctttatgagcttgaacgtttcacatcagcgcgtcgtgagtggaattatttaacagatacatcaaccaaagaagaaaagctcgcggcttcgatgctcgcggcagagcttgactggtatgacagcactatttataccttggcacaaataaaagaatgggattatgtcgagctgcgctttccatttgcctttaaaaatatttttgaaaactacagtaatcgcagtcatatagatgttgcgtggagtattgcaatttcacgacgtgaaagttcgtttgctcctgatgctcgctctcatgccaatgcttacggtttgatgcaattgttaccaagtacagcgaaatatatgaataaaagcgctgtatctcgaaaacagttatatcaaccgcgaacaaatattcgtttaggtagtcaatatctacagtatttgaaaaagaaaaatcatggcaatgagatcttagctacggcttcttataatgcgggttatcatagaattaagcgctggataccagagcaagcaatgccagcagagttatggatagagttaattccttacacagaaacgcgcaactatgtaaaaaatgtttttgcgtataggcaggtataccatacgcgtcttggtcgagatggtaatgtattagcgccaattcttgatatgactatgggtggttagtttatatatgttgctaaattgcctctgttgggggatatagccgactatgatagactgacaataagttaaatttactaaaatgggtttactatggataaattagcggtgttatacgccgaacacattgcaaccttacaacagcgtactcgaactattacagagcgtgaaggtttagaagggttggtgattcactcaggtcaagctaagcgccagtttttagatgacatgtattatccgtttaaagtgaatccacaatttaaagcctggttgccggtgattgataatccacactgctggattgtggtggatggtacagcaaaacctaaattaatcttttatcgtcctgttgatttttggcacaaggtacccgatgagcctcgtgatttttgggctgagtattttgatattgaattgttagttcagccagatcaggtagagaaactgcttccttacgacaaggctaaatttgcctatatcggtgaatatttagaggttgctcaggcgctgggctttagcattatgaaccctgagccagtaatgaactacttgcattacaatcgtgcttataaaacgcaatacgaacttgagtgtttgcgtcaagccaaccgtatcgcagtagagggtcacaaagcagcacgcgatactttctttgctggtggttcagagtttgatattcagcaagcttatctcatggcaacgcgtcagagtgaaaacgaaatgccatacggcaatattgttgcgcttaatgaaaactgtgcgattttgcattacacccattttgagcctcaagcaccgcaaagccatcgttctttcttaattgatgcgggtgctaactttaatggttatgcggcagacatcacgcgtacctatgattttaaaaagtcaggcgaatttagtgacttaatcaaggtaatgactgaacatcaaattgctttaggtaagtctttaaagccaggtttgttatatggcgaactgcatttagattgtcatcaacgtgtagcacaagtactgagcgactttaatattgtgaagttaccagctgctgagattgttgagcgtggtattacttcaaccttcttcccacatggtcttggtcatcatttaggcttgcaagttcatgatatgggcggctttatggccgatgataagggtacgcatcaggcaccgccagagggtcatcctttccttcgttgtactcgtttaatcgagaaaaaccaagtatttacaattgaaccaggtttatacttcatcgaatcattacttggtgaccttgcgcaaactgataacaagcaattcattaactgggaaaaagttgaagagttcaagccatttggcggtatccgtattgaagataacattatcgttcatgaagatagcttagaaaacatgacccgtgatctacacttagattaatcgttacatgttagtgaatgtcggggccgcttggccccatttttttagataaacaattatgtctgaatatcaatatccggctgagccggttttttaccaagaagaaattaaaaaaagcacctttattgtgcatattgcccacaccccagatctagcggctgcaaaagcctttattaaagaaatccaagataaatacagtgatgcacgacataattgttgggcgcatgttgcaggcaacccaggtggtagtcatgtttatggtttttcggatgatggagagccaaatggcactgccggcaagcccatgcttaatgtgttaactggatcgggtatcggtgaaataacggcggtagtaacacgttattttggtggtattaagcttggtacaggcggtctagtacgtgcttatggcggtagtttaaataatgctatgcgtgagcttaaaaccatcacgaaagttccgagtattgagttaattggccacagcgactacagcgcacaaggggcaatagagcagttactaaaaagtaaatatcaagtgcttaatattgataagcaatttgctgaaaacattacttggcaaatagagattgatagtcggcaagctgagcaagccattaatgatgtgcatgagcttactcatggagcagtggtgctaaaactcagaaaagtttgaaatgtaaaaataatacattccgtttacttacaattaagcctataagacaataaactgtattagctaaatcaattaaataagaaagcgatacgcctcgatgcaatttcgtaccataattaaaattctcggccaacttgtggcactatttagtatcaccatggtgccaccggcactggtgtctttaatttataaagacggtggtggtgtgccattcgttcttgctttcatctttagtgttgtgattggtttagcggcttactatccgaaccgtcatgagcatggtgatctaaaagcccgagaaggcttcttgattgtggttttgttctggctggtactaggtaccttcgcagcagtgcctttagtgttcttacaagagcctaacctctccttagctgactccgtatttgaagccttttcagggctaacaaccacaggtgctacggtactaaccggaattgaatacctgcctaagtctgtactcttttatcgccaacaattgcagtggttaggtggtatggggatcatcgtactcgcggtcgcggtactgcctatgctaggggtcggtggtatgcagttatatcgtgcagaaaccccaggacctgttaaagactctaaaatgacgccgcgtattgccgatacagcaaagcatctttggtatatttatgtatcgctaacaattgcctgtactttagcgtactgggctgcgggtatggattggtttgatgcgatttgtcatgcgttctctactattgcgattggtggcttttctacttatgacgcgtcaatggggcagttcgatagccctgtcattaattttatttgtgtggtgtttttgcttattgcagcaattaacttctcacttcactatgcggcggtatcatcacgcagtattcgtgtttatttacgcgaccctgaatttaaagtgttcttactcattcaattagcgttggtgattgtctgttttacggtattgtcatcgaataacatttatgccgatggtgatgagactctcgaccaagctatgttccaagcggtatcaatgagtaccaccgcgggctttgctaccgataatttttcggcatggcctttgtttttacctattctacttatcttttcaagctttattggtggctgtgcaggttctactggcggcggcatgaaagtagtacgtgtgttcttactttatttacaaggtatccgtgagctaaatcgacttgtgcatcctagggctatttactctattaaactgggccgaaaagcgttgcccgataaagtagtcgaagccgtttgggggttcttttctgcctatgctttggtgtttgtgatcatcatgctggcattgatggggacggggatggacaacatcagtgcattctctgcaacggccgcgtgcctaaataacttaggcccagggttaggtgaagttgctgcgcattatggtgccatttcagattcagccaaatggctattaacgatagctatggtgtttggtcgtctagaaatatttaccttgttagtgttatttactccaaccttttggcgtggataaaacgagtatgtgattttctgttagtggaggcgaaacaatgccgaagacacaaaaacaaattaatcttgaaaaactgggctgcattcctgctggtagtttggttgatattgaaatcaccacaccaactgatagtaaacgcgtaaaaacagagtttattggtttgttaaatgatcaatatataatcttaaattacccatctataaagcggatagcgaatgcacatgaatacattaaagatgctgtaatgattataatacgtgctgtacttgagacgggtggtggtcaagtcattgcgtttcgtcagcaggttagtgcaatttcatcgcatcctcatcgcttaatttttctaaactttccacagcaagtgcagctttatagtttaagaagtgaaacgcgaattcccacactattttctgcaaacttactgatcaaagagcaaacactcgaaggcctcattaaagatatttctctcactggcgtgcagtttgatatcgacagtaaagaagacttgagccagctcaaagggcaagagtgtaaggttgtactaagtaagcgggagtttaatggcactgtatgtcgagtacgtaaaagagcggcaggttttattttaggtattcagttagattcgagtaaagatgaaatgaaaggctttatgaaagaacatttaatcgacttgtctgtacttgaaaaatagcagaagtcgccattttgcaacaaagtggcgacttttcatgtttttatcctgccaacacctaaattaattcataataaatttaaatttatattaaaaatcaatattttgaatgtgatttttattttcgtatttttattttaatttcttcgttcagattgagtttatattcaaactcagaaaaatttgcttttctgatcctgtattacacccactgtctccattttaaatcttgtaagttattgattctaaatgatgtaaaaaaattacaattcactctgttgcaaaatagcaacaaaaaatcgactaatttttattaaaaaccatgttttaacatgaaagttattgatttttatgactttttaaacattggcatcgaagttgaaatagtcctagcgaacacagagaaaaactgattcaggaatatatcctttatcaaagttgagacaacattgaaggaatagtgattatgaaaacattacataaaactttagcactggtagctctagcaacatcttcagcagcgtttgctgcagattttgacacattagatgttaatggtgatggcgctatcagcaaaagtgaagcatctgtaagcgaagcattaatgagtcaatttaaagagctagatacagatggtaacggtgagctttctaaagaagagtattcaaaagcttaatttcattgtaaggacacactgaaaaggactttctaactcagacaacacactttgaaggaatgacattatgaacacagtaaataaaacacttgcacttatggcactagtatcttcatcagcagcatttgcgatgagtgatttcgataccctagacgttgatggcgatggtgtaatcagccaaagcgaagcgtctgttgatgcagagttaatgagcaaattcagtgaactagacactgacggtaacggcgagttatcgaaacaagagttctcaaaagcttaatgcaattaaataacagtttacttagctgatcagttctgtgctgccaaagacagcctaaatggataagggaatccatgaaaaaggacaataccggaagtgcgatcagctaacacttaatattgaaggaatatgattatgaaaacagttaataaaaccttagcacttattgcacttgtatcttcatcagcagcatttgcagcaacagactttgataccttagatgtagacggtaacggcgtggttagcaaaagtgaagcagccgttgacgcaaaaattatgtcgcagtttaaaacattagatgttgatggcgacggcgttcttactgaagcagagttttctaaagccgaataactgaactaatacgcagttataccagtttccactaaacagggatctcagaaacggatttcactcttttcaaattttgaggtagttattatgaaacagttaagcacaacaatcgcaattttagcattagcaacatcatcagcagcttttgcacaaggcgtaagctttgcaacatttgatactgacggcgatggtgtgatcagtaaagaagaagcatctgcaaatacacagcttgaaaagttattcccagagctagacagcgatggtaatggcgaactatcaaaagaagagttcgctcaaatccaatagaatcttttagaaaagttaggtactttcacttcaagagtcgtaaagcagctgtgatggctgcttttttcgtttataagcttttacttacaagaagatagcacttacttggaacagcttctcaacaaccgtaatgtgctttttatcaatcaagaacatgattacgtggtcaccagactgaataaccgtatcgtcatgggcaatcagtacgtcgtcgttacgtactattgcgccaatagtcgtacctgcgggtagtttgatatcagcaattgctcggccaacaactttagaagtatgctcatcaccatgagcaaccgcttcaatggcttctgctgcgcctttacgtaacgaataaacattaacgatgtcaccacgacgaacgtgtgttagcagcgccgagatggttgcttgctgaggcgaaatagcaatatcaatttcaccaccttgtactaagtcgacataagcaccacgctgaataagcaccatggtcttttgtgcgcccatacgctttgccagcatcgcagacataatatttgcttcatcgtcgttagttaccgcaatgaacacatcaacctgctcgatatgttcttctgataacagctcttgatcagaggcatcgccacaaaacaccacggtgttatcaagcatttcggataactgcgcagctcgctctttattccgctcaagtaatttaacactgtgatttttctcgagtgaacgagcaagtcctgcaccgatgttaccaccaccggcaatcatgatctttttgtatgaacgttcgagcttttgcagctcattcattaccgctcgaatatgcttggttgcagcgataaagaacacttcatcgtccgcttcgataacggttgtgccaagcggtttaattgctttaccttgacgataaatagccgctacgcgagtttcgacattcggaatgtgttctttcaaggctgaaagagcataaccaaccagtaaaccgccgtaatacgctttcaccgcaactagcgataacatgccatcggcaaattgtaatacctgtaaagcgcccggataatcgattaagcgacgaatatacttagtaaccaacgcttcaggcgcaatatagtgatcaacaggcaagtcatcgttatggaatagcttttcgcgatactttaagtattgctctgagcgaattcgggctattttggttggggtgttaaaaatactataagcgacttggcaagcgaccatgttcacttcgtcagaactggttacagcaataatcatatcggcgtcttctgcacctgcacggcgcaatacatcaggatgcgcactgtggccagtaacaccttgtaagtcgtacttatcttgtaactctcgcaaacggttaccgtcgatatcgacaacggtgatctcattttgctcaccaacgaggttttctgccaatgtgccaccaacttgtccggcaccgagtatgattattttcatagcgtgttcttattagtgttttttaactagctttgcatagtagaaaccgtcactttcaccaggcaataattgcagaccaggtaaagtaggggtgtcgttttcatgcagaggtacatgttcagcactttgattattagcaaggaacttagcaacttgttgctggttctcttgcggtaatacagagcaggtcgcgtaaactaacgtaccaccaggcttaagtagtggccagatgctattgaggatatcgccttgtaaatttgccagatcttcaatatcagatgcgcgtcgtaaccacttaatatcaggatgacgacgaataacacctgttgctgagcaaggcacatcaagtaatatacgatcgaattgctgctcatcccaccaaatatgtggttgtgaagcatcagcacattgtagatcggcagttaaaccaatgcgtacaagattttgtttaacgcgttcaagacgttcgctatcgctatcaagtgctaatacgtcggcatcggcaagctctagaatatggcaggttttgccaccaggggccgcgcacgcatctaaaataacatcatcattttgtggctcaagaaaacgtgccgctaactgagctgccgcatcttgcactgagcaggcaccggtatcaaattctggcagtgcgtatacatcacacggttttgcgagtttaattccatcaggaaagtcaggatttaaggtgtgctcaatatcattggctttaagcatctcgctgtattcttgagtgctgtattgcgcttggtttacacgtaaccacataggtgcttgttgttggttggcttcaaggatctcttgccagttgtctgggtaagccgcagttagttgtttgataaaccaacctgggtggttaaatttgcaaacaggaatttgcagcgctttttcttcaagctctgcttgttcacgttggaaactgcgtaaaatcgcgttgatcaggccttttaaacccagtgcgcgcatttgctgaagtgcatttactgtttcactaatagccgcatgaggcggcacgcgcatatgttgaagttggtaaatacccacatacaacaagaactggaaaatacggcgtttaccttttaagggttgatctaaaagttgctggcaataattctctaaactaggtaaatagcgcagcacaccgtagcaaatttgttgtaaaagggccttgtctttaggcgataaaccttggctggcaaaaggtagctcttgatttaatgatgcacctttatcaactacgttatagagagtctcagcagcgagtgctcttacattactcattgttttggcctaatgttgtacccggttcaacccaatcactgcggccatttaagaaatcgctcactgccattggctttttaccttgcggttgaagaagggtgattttaagtgcatcttgcccgcaggctactgtaatgccttgtttatcagcagcgatgattttacctgcctgtgcactttgtgttaccacttcagcttgccaaatctttactgtttgccctgccatttcggtaaagcaaactggccaagggttaaaggcacggatattacgctcaatttgcgcagcatccattgaccaatcaatattagcttcgtcttttgaaagcttcttggcgtaatttgcctgtgcgtcatcttgcttttctgctgtgatttcacctgcagcaagacgattaatcgtgctgatcagtgcatctggaccaagcgcagccagcttatcgtataaagagctactggtttctgtgctatcaatcgggcagcggctgatgtgcagcatgtcaccggtatctaagccttcatccatttgcattattgttacaccggtttcattatcgccagcccaaatagcacgttgaatcggtgctgcaccacgccagcgcggtaaaatagagccatgcacatttaaacagcctaagcgtggcgcgtctaaaatagcttttggtaataataagccgtatgccaccacaatcataatgtctgcgtttaggcttgtaagctctgcaagcgcttcagctgattttaacgattgcggttgaaatacaggtaagttatgagcaagtgctagctctttaacttcactggctttaagctttttaccgcggcccgcagggcgatcaggttggctataaacaccaacaacgtcgtgctctgagtcgatcaatgcttgtaaatggcgcgcagcaaaatctggcgtaccagcaaaaataatgcgtaatggttgtgtcacagaaattcctattgattaacttattgttttgcagccagctttgcttctttttcaagctttttacggatacgttggcgctttaaaggcgatagataatcaataaatagggtgcctttaaggtgatcaagctcgtgctgaatacaaatagctaatagctcgtcagcatctaggctgaactcttcaccattttcatttagcgcttttacagttaccgtttctgcgcggtcaacttttgcatatgaataaggcactgacaaacagccttcttcacttaccgttgagccatctttcttggtgatttctgggttaattaatactaacggttggtcgcgctcttctgatacatcgatcaccacaattcgctggtggatatctacttgcgttgcagctaagccgataccgttttcgtcatacattgtttcaagcatgtctttgacaatttgacgaacttcatcgtttacttctggtacttctttcgcgattgtacgtaaacgctcatccggaaatctcaaaacttctaacctagccatagttaccttttacacttgtgattcatttagggtattgtatgctcttattttagccattcgtgttcacctttaacaggttttggttgataataatcaaaaaacaactcaaggaagccaaatgagatactcactagttgcggctttgctagccattagctgtgcttttccagcagctgctgatgtgttaacgatcaaaaaagacgctccaaaacaatatattgtaaagaaaggtgatacactttgggatatttcaggtgtgtatcttgaccagccatggcaatggcctgatttgtggcaaatgaatccgcaaatcgcgaatcctcaccttatttatccgggggatgcgctttctttaatttacgataaagatggtaatcctcgtttggttaaaaatgcacgctataaaaagctgtctcctgaaggacgaattacgccgaaaggtaagcaagccgtccctacattaccgcttgagttgttgcgtccatacctcacttatcagcaagctattagtacagatggtatcgccgaacagccatatgtgcttggtgctagcgtcaatacaaaaatgaacaccatggggcatgttttatatgttaaaggcgatctgcatcttaacgaggcatatggtgtgtaccgccaaggtgataagttggttgatcctgaatctaaagacgttttggcacacaaagctgagttagttgctattgtacgcgcattcagaagtggagatgttgctaatggggtgcctgcctcagttaaagttgagttagttaaacaagaaataaaaccacacgatttcttgatgcccgcaatggaagggcaaatgttacctgcatacttcactatgaaacgcccagataccacaatgaatggcacgattatcgcgtcagccaatgagttgcgtgaatttagtaccatggatattgtggtactaaacttgggcgccgataaagttgaacccggttttgtgctagatattcagcgccaatcaccagaagtttttgatggtcgagaggggccacgttatcgcgaagactctagtagtcttgaaaaactaatttcagatacaaatgagttttttggtattgaaagcgatgaagacagtaatgtatggcatatgccaaaggaaaaagtgggtgagttaatggtgtttaaagtatatgacaacgttagctacgcattaatagtaaaaaaccagcatccaattcgagttggggattatgcagttctaaactaactcacaatctggaggctctaaggagggagcatggtacaggtttcaggcaagctatcccattggcttgccttttatttatgtaaaggcctagggatcaaaagccttatagcattaagtcaaaagcatccgcttggtgagttattttcactcactagcctacagttacagcagcttggtttatcgcaggcgcaagctgataatttagtaaatactgactggcagttagtggctcaccatgaaacaaaaattgagcagttgcaaattaaggttgtgagttactttgatgacgattatccgccgttacttaaacaaatagcgagtgcacctttattactgttttgtttaggtaacacggatctactgctgtcaccgcaaatagctgttgttggtagccgtaatgctacaccaataggccttgaaatagccgcagagtttgctcatcaactttcactggctggcatgacaattacctctggaatggctatgggtattgatagtgcggcgcataaaggtgcattagccggtaccggcaacacaattgctgtgcttggaacaggaattgatattgcctaccccaaacgaaataaattgttgattaaacaggtggctgaacgtggtttattagtgtcggagttcttacctggcacggcagctagtgctactaattttccacgtcgaaaccgtattatctccggcctttctttaggtgtacttatagtcgaggcgcagataaaaagtggttcacttgttaccgtacgctatgcgttagagcaaaataaagaagtctttgcagtaccgggatcaattaaaagtcctttgtctgaagcgagccactttttgattaagcaaggcgctaaactcacagaaaatataagtgatattcttgatgaagtgagctttttctgtgaaaacagtctatatagtatagaacagcctagtgcaaatgagcctaactgtcctgtcttcaacagtatcgggtatgaggtcacaagtgttgatcaaataacgcagcgtagccaattaccagtcgatgaagtacaagctcggttgcttgacctagaacttgccgataaagttgagcgagtgctagacggttatataagacttggaggacataaatatgtttgacatcctcatgtatctttttgaaaactacattcatagcgaagctgaaatctttacagaagagaacgagcttactgatgagttagttcgtgcaggttttaataagcccgaaatttacaaagcacttgattggttagagcagctagctgatctgcaacaaagtgatatatatccgtatctaaatgcacagccgcagcatgcaatgcgtatttacactgatagtgagtgtcaaatgctgagcgttgagtgtcgtggatttttaatgtttatagagcaaatcggtgttatcaacaccgttactcgagaaatggtcattgatagactttgcgctctagataagccatacatctctttggaagatctaaagtgggtagtgttaatggtgctatttaatgtgccaggttcagagcaagcttatgcgcaaatggaagacttaatatttgacgaaccagcagacgtcttacactgagtagactttgcttgtatctttgttgagtttgggtatattaggcgaaaattagccaaccccacaggaatcttatgagtaaaatcgaccattctcttttttctgcagataaacatgcattagaaaaagagtatgaggtttgccctaaatgcggttctgagttggttatgcgcaactcaaagtcaggaccgtttttaggctgtgccagttacccaaagtgtgactacattcgcccattagcacatcatgatagccaacagataaaagtccttgaagacagtgcctgtcctgagtgtggcaagccattggtaattaaaaatggtcgctatggcatgtttataggctgcacaggctatccagattgtcattatattgctcatgatgaagagcccgatgatgcaccagtattgccagcatgcccaaagtgcaaaaaaggccaacttgttgcgcgtagtaataagtttggcaaaaccttttattcttgtgattgctatccacgctgtaaatacacattaaatcataaacccgttgcaaagccttgcccagcttgccaatggccaattatgactgaaaagaaaactgcctcaggtgttgtgctacaatgcccgcagaagtcgtgtatgcataagttagttgaatcttaatacacttgttattcgcatattgaggagagttccgttgtctgaacctgttgcacaacctgccagtgctattgatgctttgcaacaaggcggtgtaattgtatatccaaccgaagctgtatttggtcttggttgcgatcctgatgatcaagctgcggttgaaaagctattagctattaaacagcgcccagttgaaaaaggcttaattttaattgctgataactatggtcagttattaaagtatgttgatgatgccaaaatcccaatggataagcgtgcagatatattctcgcaatggccaggtgcgattacctgggtgatgccagcagcaaaagaaacgccaaagtggttaacaggtcagtttgatactattgcggtacgtgtaactgatcatccaacagtaaaagccctgtgccaacaatttggtaaaccgcttgtttctacaagtgcaaatttaactggccagcctacagttatgagtattgaacaggcaaaagcagagtttactgatatggttgacttctacgtagatgagcccctcggcggtaacactcaaccaagcgtgatcaaagacgcagcgaccggcaaagtatttagaggataaacatgcaaagcgagctactcgaacaagttaaaacctatttaatggccttacaagacacaatttgtcagggcctcgaaagtgccgatggcaaagcaaagtttgttgaagataattggcaacgtgcagaaggcggtggtggccgtactcgtgttatccaaggtggcaatgtcattgaacagggtggggtaaactattcgcatgtgtttggtgcttcaatgccagcctctgcaacagcacatcgtcctgagctcgctggtcgtagttttcatgcgtgtggtgtgtcattagtgatccaccctaataaccctcatattccgactagccatgctaacgtacgattcttcattgccgaaaaagaaggcgaagagccaatttggtggtttggtggcggttttgatttaaccccttattaccctgtatttgaagatgtacaacactggcatcaggtggcaagcgatttatgtcagccatttggtacagaggtttacgacaaatataaaacgtggtgtgatgattacttttatttaaaacaccgtggtgaaactcgtggtgttggtggcttattctttgatgatttaaatgagcttggctttgagcaaagctttgcctttatgcaagcggtaggaaatggttatttagaagcttacctacccattattgagcgccgcaaagacacaccaacaactgagcaacaacgcgacttccaactgtatcgtcgtggtcgttatgttgagtttaaccttgtttgggaccgcggaacattatttggcttacaaacaggtgggcgtactgagtctatcttaatgtcgatgccgccattggcacgttgggaatataactatgtaccagctgcagacagccctgaggctaagctgtatcagtactatttacgcccacaagattggttaaatacgcaagagtcagacctagttgcacgtcagtggcagctttaatcaaatattgaaaccactctaatcaacattgtgttgtcaccttcgacgagggtgacgacccgttcgctacttggcagctctggtaatacgctaaataacacctcagcttttaaaatctctaactcttctttaggagtattgatgggagcactgatttgcgttagacattggtttatatcacaggcataaaagtcgagttttacttcataatactcaggatgctgaataagcttttcaaaaccatcaacaatgctttgttcatgtttatcactgcgtgatgttttaccctgactaagcagtgattgagcaatctgttgaatatcatcatgataaatatattcatcaatagtgcttatttgaactgaggaatcgtttacgctgtgctgataggtaaacagtagtgccgcaataaccccaatgcagactaaaagagttgttataaatttcatttaaacatccttatttactatgaaatattcataacaactctagcagttgcatgaaaaactcgcaatttagcttaatttaaagcgtctcacttgttcatccagtgagcgtgctaacgacaacagctcttcactgaccttttggttttcatgcgcatcaaccaatgaatgctcggcattatcactgattgcaataacgctttggttaatttcttcagctgcaaggttttgctgttcagtggcatcagcaatttgtacgttaagttggtttatctcgctcatttgtgaagaaatatcacgtaatgcttttgcaacctgcttaacttgaactgctctctcgtcagcttcttcacaagagttattcatcgtattaacggtttgcgcagcttcactttgcagtttgtcgatagtgcggcgaatttcatccgtagagtcatgagtgcgagttgcaagagtgcgcacttcgtcagctaccacagcaaagccacggccagcttcaccagcacgagccgcctcaatcgcagcattaagtgcaagtaagttagtttgttcggcaatgctactgatcacctcaagtactttgccaacgtctagcgtttgggtttgtagttgagttacttgatcagctgccgctctcacatcagccgcaagttgattaatactttgctctgtatgctcagcaacgtgtaagctttgctgtgcaagctgattactgtgctcagacttctcagacgcaaaatgtgtcgtatttttaacttcgcttgatgagctttcgagctcattaatggcagctgctactgagtctgtaccttgcttttgctttaaaatcgcctgctctgttgcatccgcggaggcataaatgctttcggcagagtggatcaacaccttagaagagtgggaaacttgggcaatattatctttaaatgcaccaatcatgtgattaaagctggtggcaagtgaactaagctcgtcattattgttgtcatcaatttttaggcttagatctttattggtagttgccaaatgcatggtatggctaatgacttttaagcgtttgataaatatttttctaaacatcaccgccagcagtgtaaatgcagtaatgaaaatcgccgttaatagcagcgtgttcattaacgtgttttttgaaacttcttgttcaatatcagccaacgaataactaatttttactacacctaatacatcaccttcctgtgcttggtgacaccccaaacagttagtacctttatagtcacttctggcaaacatcggtttaaggtaagtcatcgtgcttgtatcttggtcaataaaaagtgcttcattgcctgttaatgcttgacgctcagcatcattcacagctacttggtttgcattaccggggccataaattttattaacgatcggactacgtatgatatgggcatcttcaatattagggtggcttcttaatttagtactcagaatttcgcggttagccatagtgccagtcagcatcatggtattaatggagtcaaagtaattatcggcaagcagctttatgttattttcaacagtatcttgtgctaattcatgttgttgctgggcgctactaaatatactggcaaataaaaccaatagcccggttacagccagcaaggcataaattttaaattggatagacttcattcaacgacgctttttctaaattaaggaaattttattatctttatttagaaaaagcgtacattgatatagcgcaaagcttagttaattttgattaatcatatggctggcgagttgcgataacgattgtcttaacccttcgcgaagtagtgggttatcaatttcgatatcgagcgttttattcatgcaatgcatccattgatcacgtaagtcttgatcaatagggaaaggcatgtgacgctttctgagcattgggtgaccatatttttcaacgaataggtccgggccgcccagccagcccgataaaaactcaaagaatacttggcgaattctatctaaaggttgaggatgcatatcatataatggtttggcgtattcatctgtggccattatgtcgtaaaatcggtttgcaattgctcgagcgccagcttcaccgccaataatttcgtaaggtgttttctctggggtaggcgtttcaggcgttggtttcgatttagaaaaaagtcgtttaatcataatattaataaagctcaacagggcgaagaggttgcttcactatggataaatacgcggtttttggaaatccaatcaaacattcgaaatcacccgcaatacacgcacaatttgctgcatcattaaacgagcaaatacaatacagcgccattttagcaccaacagatgcatttgaaaaaactgtcgctgagtttttcgctgccggtggtaaaggggccaatgttacattgccatttaaagagcaggcgtttgccatggtcgatgaactcacagagcaagcgaaaattgctggggcagtcaacactattaagcaactcgaagatggtagcctacttggcgataacacagatggtgtagggcttgttaaagaccttttagccaataatgtcaccttaaaaggtcagcgagtactgcttattggcgccggtggtgcggcgcgcggtgtcattcagccattattgaatgagcaaatcgaaagcttaacaatagccaaccgtaccgccgaaaaagcaaaggcactagcaagtcattttaatggtgaaattgatgtgcagggctttgctttaaatgatatcccagcaaacaactatgatgtggtgattaattcaacctcaagtagcgtaacgggagacctgcctggtatagcagaagaccacgttgctaagtgtctgtgcgcttacgatatgttttacgccaatgacgataccgcatttatcagttgggttaagtcgattaacccaacatgtttaacacttgatggttgtggcatgctagttggtcaagcggcacaggcttattttgtatggcgcaataaaatgccagaaatcattcccgttgttagcgcgcttaaagcaggagaaattgcgtgaatcaagctatccaatttatagaccgactcgaatttaagccagaagaaaagcagttggtgttttttgcccaagtgagtggcttgatggtggagtgtgttattgataccagcaaatatgatttcgctgatcaaagcagcgcggttaattactttgaatcttatcgtttcgattacgaagagctcgccgagcaactgattgaagatgagcagtataactcggcaggacaaatcgaattaaccgaggtgttttagccctcagctaagtattcatctttaagctgaacataattatcagcagagatttttaaaaaggcgcgctcttgctctgttaaagggcgagcctgtttaacagggctaccgacataaaggtaaccagactctaaacgcttgttaggtggaactaatgaaccaccaccaatgatcacatcatcttcaacaattgcgttgtccatcacaatcgcacccatgccaacaagtatacgattacctagttggcagccgtgtaacataactttatgaccgacagtgacgtcatcaccaataataagagggtaaccatcggggtttgacttagaagcgcgtgttaaatgtaaaacactgccgtcttgaatgttcgtacgttcgccaatacgtatatagttaacatcacctcgcgcagcaacaagaggccatacacttgaatctttaccaagcgtaatatcaccgactaaaaccgatgactcatcaatataaacactattatcgtatgtcggagtgatccctttataagaacggatagtcataaattcaccttttaatttaaaaatgcgctcagtctagtgtaacagcgaagcaaataaatacaccaaaacagagctaaattgactgctaaacagccagttttagggtgtttagttcaaaagctgagcgaacagtacgtttttttaaattttattgaaaaaagtgcttgcgtaaaaaatccatctccctataatgcgaccccactgacacggcgggcagcaacgaaagacgctgaacaacgtagcagagagttaagtgaaacttcggtttcaaataatcgaaagaaagtttgaaattaagtgttgactcgaaaatttaaggatgtattatacgcatccctagcgacaacgtcgcaacgttctttaacaatataaagcaatcatctgtgtgggcactcgtacagattgagttctaacagcagattctagttcgctagatgacgcaaacaaatttagagtctcaatttcttatgagtgactatatagtcaatttatacagaattcattgagcacgaaacttcggtttcaaaaaacttttaattgaagagtttgatcatggctcagattgaacgctggcggcaggcctaacacatgcaagtcgagcggtaacagagagtagcttgctactttgctgacgagcggcggacgggtgagtaatgcttgggaatatgccttatggtgggggacaacagttggaaacgactgctaataccgcatgatgtctacggaccaaagtgggggaccttcgggcctcacgccataagattagcccaagtgggattagctagttggtgaggtaatggctcaccaaggcgacgatccctagctggtttgagaggatgatcagccacactgggactgagacacggcccagactcctacgggaggcagcagtggggaatattgcacaatgggcgcaagcctgatgcagccatgccgcgtgtgtgaagaaggccttcgggttgtaaagcactttcagtaaggaggaaaggttaagtgttaatagcgcttagctgtgacgttacttacagaagaagcaccggctaactccgtgccagcagccgcggtaatacggagggtgcgagcgttaatcggaattactgggcgtaaagcgtacgcaggcggtttgttaagcgagatgtgaaagccccgggctcaacctgggaactgcatttcgaactggcaaactagagtgtgatagagggtggtagaatttcaggtgtagcggtgaaatgcgtagagatctgaaggaataccgatggcgaaggcagccacctgggtcaacactgacgctcatgtacgaaagcgtggggagcaaacaggattagataccctggtagtccacgccgtaaacgatgtctactagaagctcgactcttcggagttgtttttcaaagctaacgcattaagtagaccgcctggggagtacggccgcaaggttaaaactcaaatgaattgacgggggcccgcacaagcggtggagcatgtggtttaattcgatgcaacgcgaagaaccttacctacacttgacatacagagaacttaccagagatggtttggtgccttcgggaactctgatacaggtgctgcatggctgtcgtcagctcgtgttgtgagatgttgggttaagtcccgcaacgagcgcaacccctatccttagttgccagcgattcggtcgggaactctaaggagactgccggtgataaaccggaggaaggtggggacgacgtcaagtcatcatggcccttacgtgtagggctacacacgtgctacaatggcgcatacagagtgctgcgaacctgcgagggtaagcgaatcacttaaagtgcgtcgtagtccggattggagtctgcaactcgactccatgaagtcggaatcgctagtaatcgcgtatcagaatgacgcggtgaatacgttcccgggccttgtacacaccgcccgtcacaccatgggagtgggttgctccagaagtggatagtctaaccttcgggaggacgttcaccacggagtgattcatgactggggtgaagtcgtaacaaggtagccctaggggaacctggggctggatcacctccttatacgatttagaacttatttgttcgtagtgtccacacagatgattgttaattgtaaagagaacaacacttattgtttgggtctgtagctcagttggttagagcgcacccctgataagggtgaggtcggtagttcaaatctactcagacccaccactttgctcccatacttcgttatggcacgcctcgtttagtgaactaaacgtcgttgtaccatgccttgtctggaaacaaagtcggttacaaacaataagtaccagcatatgtggggctatagctcagctgggagagcgcctgccttgcacgcaggaggtcagcagttcgatcctgcttagctccaccacttttactccttaaaaataaacattcttaatcaggtaataaactgcttgagaatagagtgtgtttaattttgagaagtttattctcttgctctttaaaaatttggaaagctgatattaaaattcttatagatacttgtatctataaagagttttcaaaagtaaaaatatgccagttaatcagcaatgattaatcggtatctactttagtattctcatcattatttgatgaattaacttctggcgaagttaacagctgtcactaacaaagacccgtttgggttgtatggttaagtgactaagcgtacacggtggatgccttggcagttggaggcgatgaaggacgtattaacttgcgataagcctagtcaagctagtaaaaagcgcttgagactaggatttccgaatggggaaacccacctgcttgcaggtatcttacactgaatacataggtgtaagaggcgaacgcggagaactgaaacatctaagtacccgtaggaacagaaatcaaccgagattccggaagtagcggcgagcgaaaccggaccagcccttaagcttattatgtgttagtggaacattctggaaagtttgacgatacagggtgatagtcccgtacacgaaaatgcatcttaagtgaaatcgagtaggtcggagcacgtgaaactttgactgaatataggtggaccatcatctaaggctaaatactcccaactgaccgatagtgaaccagtaccgtgagggaaaggcgaaaagaacccctgtgaggggagtgaaatagaacctgaaaccgtgtacgtacaagcagtaggagcccacttgttgggtgactgcgtaccttttgtataatgggtcagcgacttatattttgtagcgaggttaaccgattagggtagccgtagggaaaccgagtcttaactgggcgtatagttgcaaggtatagacccgaaacccggtgatctagccatgggcaggttgaaggttgagtaacatcaactggaggaccgaacccactaacgttgaaaagttaggggatgacctgtggctaggagtgaaaggctaatcaaaccgggagatagctggttctccccgaaatctatttaggtagagcctcggacgaatacttacgggggtagagcactgttaaggctagggggtcatcccgacttaccaaccctttgcaaactccgaataccgtaaagtactatccgggagacacacggcgggtgctaacgtccgtcgtgaagagggaaacaacccagaccgccagctaaggtcccaaagtcatagttaagtgggaaacgatgtggaaaggcccagacagccaggaggttggcttagaagcagccaccctttaaagaaagcgtaatagctcactggtcgagtcggtctgcgcggaagatgtaacggggctaaactatgcaccgaagctgcggattcatactttgtatgagtggtaggggagcgttctgtaagccgttgaaggtgacccgggagggttgctggaggtatcagaagtgcgaatgctgacatgagtaacgataatgcgggtgaaaaacccgcacgccggaagaccaagggttcctatcccatgttaatcagggtagggtaagtcgacccctaaggcgaggccgaaaggcgtagtcgatgggaaacgggttaatattcccgtacttggtataattgcgatggggggacggagcaggctaaacaagcatggcgttggttgtccatgtgaaagtgagtaggttggtgacttaggaaaatccgggttgctaagactgagacacgagacgagcacctaagggtgtgaagttgttgatgccatacttccaggaaaagcctctaagcttcagattataccgaatcgtaccccaaaccgacacaggtggtcaggtagagaatactaaggcgcttgagagaactcgggtgaaggaactaggcaaaatcgtaccgtaacttcgggagaaggtacgctcctatctgtgatgagacttgctctctaagcggacgggagccgcagtgaccaggtggctgggactgtttattaaaaacacagcactgtgcaaaatcgcaagatgacgtatacggtgtgacacctgcccggtgccggaaggttaattgatggggttagttttcggacgaagctcttgatcgaagccccggtaaacggcggccgtaactataacggtcctaaggtagcgaaattccttgtcgggtaagttccgacctgcacgaatggtgtaaccatggccacgctgtctccacccgagactcagtgaaattgaaatcgcagtgaagatgctgtgtacccgcggctagacggaaagaccccgtgaacctttactacagcttggcactgaacattgaccctacatgtgtaggataggtgggaggctttgaagcagagacgctagtctttgtggagccgtccttgaaataccacccttgtagtgttgatgttctaacgttggcccctaatcggggttacggacagtgcctggtgggtagtttgactggggcggtctcctcccaaagagtaacggaggagcacgaaggttggctaagtacggtcggacatcgtacggttagtgtaatggtagaagccagcttaactgcgagacagacacgtcgagcaggtacgaaagtaggtcatagtgatccggtggttctgaatggaagggccatcgctcaacggataaaaggtactccggggataacaggctgataccgcccaagagttcatatcgacggcggtgtttggcacctcgatgtcggctcatcacatcctggggctgaagtcggtcccaagggtatggctgttcgccatttaaagtggtacgcgagctgggtttagaacgtcgtgagacagttcggtccctatctgccgtgggcgtttgagaattgagaggggttgctcctagtacgagaggaccggagtgaacgaaccgctggtgttcgggttgtcatgccaatggcactgcccggtagctacgttcggaactgataagcgctgaaagcatctaagcgcgaagcaggcctcgagatgagttctcactagacttttaaagtctctgaagggccgttgaagactacaacgttgataggcagggtgtggaagtggtgcgagccattaagctaacctgtactaattacccgtgaggcttaaccatacaacgccaaacgcgttttatgacagcgtaacagacagaagttaagacactaaagtagacatttacttgatatcagaattccgaatttattaatttgctcaaaagagtgaattaaaaccaaatttgcttggtgacaatagcgttttggacccacctgaccccatgccgaactcagtagtgaaacgaaacagcgccgatgatagtgtggcatttgccatgtgaaagtaggacatcgccaggctccaaattaaagaaagcccgattcgaaagagtcgggcttttttgcgtttaagctgtcagacgtcagttgaaatgtggggttgtcctgtacagagtcatcctcagcaataaaacccccgtaggaggcacttcagtgccgaattcagacctttacaaaaacattaatggctaaggccattcctacaagtacactttgcctagaaccttcgttagaggaagacgcagtaccaaaaacccacatcgcgcggctgatcgctgaaggctgaaagctgatagctctgtgttgggtttcgtttcgctctacccaacctacgccaggcctttaaactttccccttgctaactttactctcgctaactagcaattcacgacccaatttaccctttgttgcaattttaatcttggtttagtacctgagctatgtaaaactatttgcgtttttaaaccacaatcaggtgacatgaatgtctcaaataaaagcttggaaacttattagcctgttttgtttggtaagcttgcttatgggctgtgagtcgaaagaagagcagcttaaacaaacaatacaacaatccatagaaaaagctgaggttgaattaaatcagcttggtacggcgcttgataatggctctttgcgtaatgcgacgatactaaaacaatacggcaaggtgcttgctgagcagcaaccgcaactttctgagatcgcccgtgtaattagtcttgatgccactcgtgaaggggctatttattcaggtcttacacaacgcttagctgatgttaagtctacttatctaatacccccttatgaagatacccttcatcaacttgatctcattcgtgatgctgccaagccatctttatttcaagatgcgcttaccgatcctattaatatgcttgccgatatgtcgcagggctcactagcgcgggttggtgcaattagtgaagcagctgaaggtgaaagcgttggtaaccaattagttggcaaccctaactatgggcagtggcaaacaaatagcagcggtaccagcttttgggtttggtatggaatgtatcgcatgttgggtgatgtatttgaccgagttgaatatggtcgctggagccgtcatagaaagtacagttattacaatgactatggccgttaccgttattcgagtccaaaacagattaaagcacaacagactgtagagacgcgaactcgtcagtcttatcaacgccaaggtaaacaattcactagtccgtatgccactaagcgcagtggtgcatctggattaagccgtagcagctatacgccgccacgcacacgtagtagctatgcttctagcagtagttacagtaaaagctctgggtcattacgcaacagctcgagcagaacatcacgtggcattagccgcggtaagtagtgaaaagaataaccaccggagttacaacatatgtatgaatttaatggaataacaacttggtcgttgcaagctttagcaatcgactttgcaatcattatcgctttatttgtcagcctaaaatttatcaaaggctgggtgtctaacttacacgctaatgatgaaataactgagcgtgacaattttgcttttggtattagttttgctgcggggcttgtggcactggcaattgttcttagtggtgtaagcagcggctcatttgcaccaaccttgcaacaagaagcattacaaatgctaggttatggtgtgatggcaattgtgcttattaagcttggtcatttcttccaagacaaggtagcgcttcgtaaagtgagcctgcatgacgaaatcgtaaaaggtaacgcaactgctgcactgattgattttggtcatgtagtgagtgtcgctattgtgattcgctcagctttattttgggtggcaaccgaaggctggcatggtattccaatcgtgatcgcggcctttgcaattggcagcattgcaatgctactgatcagccaatatcgagtgcagttatttaagcgcactaatcgcagtggtgactgcttacaacaggcggttattgacggcaacttagctgtaggtattcgttacgctggctttttagtgggtagtgcattggcattaactgctgcatcaggtattgctccttatgctgctgacaatattgtagctagtttaggttactgggcattaagtgcagcggtaagtttagttgccttcattttactacacttagtgactatcaaaatcatcctatctggttgtgatatttcagacgaagtaaaccgtcagaagaacgtaggtgtagccgctatttcagcagcggtttcatttgcgattggttcgactatggcaaccttgttaggtgcctaattagtgtctattacaacaagcgccccaagtagagcaaatctacttgggcatgatttcctgttaataactgttatggccgtactcgctgggtgcggccttatttatgaataccttctatctcattatgcaggtcgtgtcttaggctcggtcgagagtgccatatatgccatgattggcaccatgattgtcgctatgggtatcggtgcatttttagcgcgttggtttaaagatgcatttactgcttttgcttggcttgagagcattattgctttggtcggcatgggctgtattttagcgattgcgagtgttatcgctgtcagttattcattaccacatatcttctctgaaatttttaacctgcctccagataccgtacttaacggctacgtgtttgaaaagctgcaagagtggtcgcgtttcttgccctatgtgtttggtctattacttgggctattaatcggtatggagatcccgctaattgcgcgtattcgtcagcaagtctacgggcgctttttagaaaacaatgcgggtaccatttacggggcagattatattggtgccggtgtcggtgctgctatttgggtgagtattatgctcgcgatgccaattatgcaagcagcagcttggacggcattatttaatattattgccggtctcgtgttcttatggcgctatcatcaacatgttcgcttcgctaagctactgttaatttgtcatggactgtcgttggtgttttttgcgtttgtgcttgtgcttggcactagctggatgaaaaacctaagtaatgttttatacaaagataaagtcatctactcgcaagcaactaagtatcagcacttggtgttaactgagcgtttgagtcgcaatcagccaaatgcaattactgatctttatctaaatggccgtttacagttctcaagtgtggatgagcaaatttatcattcaatgcttgtctatcctgccatgttggcttcaaatcgccacgaccgtgtactgatcatcggcggtggtgacgggctggcacttcgtgatgttttgaagtggcctgtaaagcatgtcaccttggttgatttagatggtcaactgttaaacttatttggcaatgatgtaggtgactatgatgcgccagatgagatcagaacacgtttaacaagccttaataagcactctatgagtgatccccgcgctgatattcgtattgcagatgcatttttagaagtcgaagcaatgcttgctaaaggtgagcgttttgacactattttgattgacctaccagaccctaatcaccctgatctcaataagatgtacagtgattatttttataatcatgtgcgtcagctattggcgcctgacggggctgtggctgtgcaatcaacatcgccttatcatgcgaagaaagcatttttgagtattgctaaaacaatgaaagcagctggttttggttatgttgagcaataccagcaaaatattccttcgtttggtcaatggggttggacaatcgcgaccactgctggcaaatcagcaagtcagcgaattcgtgaaattaacgaattacccgtgccatctcgttgggtaagtaaagaatatttattggcttcttttgtatttccgaatcatttttttgaacaagtaaacacgattgaagtcaatagattaggttctggaaccttatatgattattaccgtcaagcgtggcaagttgaaaccgaattgtacaaaaattgatattttatagttgacataatatgtcggctatgcaaatcttaactcagacataatatgtcaaaacgtaaaaaggtgagacatggaattaaatgaactatcaatcaaactggcttcttttgaaacagaaggtgtgagctttgagtctttcttgattgccaacgagggtgagcaagatgtgttacaagttatcgtcgatgggaatgatgagttacctatctttgttactcaaacagaagagcaattactgtgtattagctacctgtttgctgaagacgaagtacaagcagatatgcgtaatgagttaaacgaaacgttactacgtttaaatgtaccaattccattaagcgcatttgcaaaaattgatgataagtacgctatttttggcgccttatcggttaattcatcgtttgatgatattacccatgagttggtaacactggcagacaatgcgattgatgcgcttgaagccgtgaccatttatttaaacgattaattagcaatttctggagttaagattatgagtattttaaagaaactatttacagctgtacgtggtggcgctcgtgaagcaggacaagcaattgttgatgcaaacggtatccgtatctttgaacaagaaattgctgatgcacaaaatgccttacaacgtgcaaaaaaaagcctgactgaagtaatggcaaaagagatgcaaacgaaacgtaaaattagcgcactagatgcatcaattgctgaacatgaagcgtatgcaggccaagcgcttgaaaaaggcaacgaagcgctagcattagaaattgctgaaaaaatcggtgattttgaagctgaaaaagcagagcacgaagaagtgttagctggttttagtaaccacattgtgcaactaaagcagcaagttaaagaagctgaaaagtcgattaaagaaaaccaacgtcaattaacaatggttaaaacgactgagagtgtgcagcaagcaacaatggctgtaaacagcacgctaaatacgaatagctcatcaatgacatcagcacgtgagtctctagagcgtattaagcagcgccagcaagaccgccaagaccagttaggtgcggctaagcaattagaagcagacactaacggcgatgatttaaaagcgaaaatggctgaagcgggtattggtgatacgagcccgaaaagcgcggatattttggcgcgtattaaagcaaaacaaaatagctaatcagttaacggaaagacaaaaggtaacccacacactgggttaccttttttacttcaacaaggagtcagccaatgtttaacttttttaaatctaaaaaagctccagagcgtcagcttactgatccaagccaattactcgttggtgatatgttaactgtgattgattcgtttgcttacccaagctggttaaaaggacagactttgcgagttactgatgtgcaaacgtatcagtatcaacgtagtgcagagtatgagttggtactcgaaagcgaatctggccaagtggtgtttttgcaaatcgagtcagatgacggtgaacagtgggcacactttgcgatcaaaattcaacgcgatgatgttgatgaaatttttactctcgatgagttcgctcgtatttttgatgaagacgaattaacggcaattaatgtacaaaatagcccagaacgttttagtcactttttggcatcgagctacaaacaaacagaagcaccttatgtgtgttatttccataataaggactaccgtaataagcctttacctcgttatgaagatgaaggcggtgagccgtgtgaaatgatttgtttaagctctgatgatgaatcgcatagtttaaatattgaaatttgggaaggcggtgaaacagaggtatcactgacgttaaccagaccaattagcgatattgttgacttatttcctggggatgccaagtgagtgatgcaaaagctaagtggcagcgtcaggaacaagcagttagagccacacaaatggcgtttgatttaagctctgaagtgcaaaaatcaattaagaagcaagccattgaccaagagcttacgccatcagatatgatccgtaagattttggagctcgacgttaagtcgaaaaaaaccagacagcgtttatcgtttaacttaaatgatgaagaaattgccctattggctgagcggtttggtgttgctgctgatgataagcgagctgtgaaacagcgtgtggcagaactactcattgcgcacagtaaaaaaagctaaggttttgcctttacttctttaagcccttacactgagactagatgttttaaagaagtgacatgactttggatattattttacttgcgtatttagttatttttgcattatttggcactgcagcaagttactttgttcgctacatttacgcttactgggtgcataatacaatgcaggtaaagtacatttataaggccgggatttgtatcatcagcgtggtgatagtatccggccttattgcattgtttacttaatctcgattgcttggcactgctgtgaaatacacagtgattgtaccggcaggactggcgagcaatcgttaacggttaatgcttgctcagatgacttctcagccgctgtaattcgctctgcaagttgctccgcttgttcttgtgcggtgtttaacgttgaatagaccacatagcgacttgggccaccacatgctcgttcaccgacttctaacaccttacattgaaagcttgcattacagctattattactaacgatatcgttcagctgatcgtttaaatcacctaaatcaacgcgtgcagaactacctgacgttgttgtttcacaaccagttaaagcaatacttgctaacacagttgtggtgatgaaaagtttcttaaaagtcgatgaacgaaccattattgcttattccttagtatacacttgccgctgagccttcgattctaacacaagtattctcagaacactgcgcacccggtgcggttagatgctgacaaatactcatcatgtcgtttgctgcgttaaattgcttttcaagggcggtgatgtcttttgcaagtttttcaacctcagcagtgttagctgttttgcttgaataaacaatgaagctacttggcccaccacaggcgcgactaccaacaggtaatactttacattggctgctgttgtcacagcttgcatcatcgattagctgtttaagttgtttgtgggcagagctaatagtggctttgtcaggggctgctttgctcacttcttcagcgttttttatttcaacggcttttggcgcctcgacaagtttattgctggttgccgttgattcggcttgctcattatttgcagcgtccgaacacgcagttaataacacaggaaataaaattgccaatagaggatagcgcataacatacctaaaaatcgttgaataagtactcactatcatacacattgctcaaagtggagcaataaaaacgttagctttcagtaagtagctctgtattcacagagctacagtaggataaaagttctataaaccaccttgggttagtttggcagggtcaagtaattcactcaattcttcgcgcgaaatatcagtatgctctgcagcaacatcaataatagggcgaccttcttggtaagctaatttggcaatttttgccgctttgctatagccgatcaccggattaagtgcggtaaccagaattgggtttttagcgagcgctttatcaacattgctttggtttactttgaagctggcaatcgctttatctgccagtgcttcactactatttgccagtagttcaatactttgcaaaatgtttagggcaatcacaggtagcatcacattgagctcaaaattacctgcttgaccagccacggtaatggtggcgtcattaccaattacttgtgcgctgaccatagcggcagcttcagggatcactgggtttactttacccggcataattgatgagcccggttgtaaggcttcaagctcaatttcaccaaggccagcaagagggcctgagttcatccagcgtaagtcattggctattttcatttgtgctacggcaagtacctttagctgacctgacagcgcaacaatggcgtcttgtgatcctatgttgtaaaagaagtttttgcttgggctaaagcgaataccgacattctcactcaagtgttggcaaaactcaccggcaaacgcagggtcggcattaataccggtacctacggctgtgccaccttgcgcaagttcacaaactcgctcaagtgcttggcgaatcccagccattgcatgatccacttgtaactgccatgcggtcaatgtttgtgcaaaactcacaggcattgcatccattaaatgagtgcggccagttttaacaatatggcccacttcggcttgtttgttttgaaggctttgactgagtttatcgagtttaggaaatagttcataaatgatgttaatggcgctacttaccgcaatcgcagtagggatcacatcatttgagctttgtcccatgttcacatcatcgttggggtgaatggtttcgcctgcaaatttactcgctagtgttgcaataacttcattggcattcatatttgagctagtacctgagccggtctgaaatacatcaactggaaactctgaaaaatgtttaccgtcgatgatctcttggcatgcttgctcaattgcttttgctttaccttggctcaaatggcctaaagctgcattgctttgcgcggcagcttgtttaatgtaggcaagggcggtgataaattgcttaggcatggctaagccactaattttaaaattattgatagcacgttgcgtttgagcttgatacaaagcattggcagggacttgtagttcacccatgctatctgattcggttctaaattggctcataaacactcctaaatcgggttaaattcttggctgagaaggcacgcttctcgctccaaactgaaatacttttcaatacagttatgagttttgtagtaacgctttagcgcaagttgcggtttataaagctgggccaaacattgtttacgaattgcattatgcactaatgaatcacacatcttttcaagtagttcatgaaaggtgcgtcttagatacagctcttgcaaaataaagttgtgatgtttttcgtaatagcgtgcaatgtttaaacccgcttcaacatagttagcaacaagcgcaggggcatgtaacccaggtctttggcaaacacatttcatttgccgctgataatggagcatagcattgtgagagtgcatagaaaaaccgattagctgtaatgataactattatcattacagctaatcggttttagtgcaagtcttatctagtgtagctaagactgaatggattaactgtgtgtgattaattgtagccgagaataaaaatctggtctgtttcatgttttttcggcgcctgtacattttctttgttacattgagaaagaaggtcgataacggttgctctgtcgtcacaactagttaaggcggctttttcgctttcagcacgttcgctggctgcaagtgctgcatctacagcggtgtagggtgagatatacataatgttgctcctattgattaattcacatatgaaaaagcataagctgtaccaatattgacaaaaacacataagcttttgaatttgttgtttttatatttttatctaataaattacccgcgactttagtgattatttttgctttactgttgtgcactaattaccaaacatggtgcattaatttgtatggataaacccttctctcaagcctgtgaaaacaataagtcacctattttaaaggtattaaaagagttcttttctgatgtgacggatgtattagaagtcggctcaggcacagggcaacatagtgtgcattttgcaacgcatttagcacacttgcagtggcattgtagtgatcgtgaggttaatcaccctgggatattacagtggcatcaagaagctgcactaactaacttgcatgcaccactcacactcgatcttaatgatccttggccagttgataaagtgaatgctattttcaccgcgaatacgatgcacattattagttggccactggtggagcgcttttttcaaggggtagcaaagcatttagcgcctaaaggaaagttatgtatttatgggccatttaagtatcaaggtaagtataccagtgccagtaatgctgagtttgatgcttttttaaaacagcaagatgctaatagtgcaattcgtgattttgaagcgatttgccaacttgcagagcaagctggcttaacctttgttgaagatgtgcaaatgccagcgaacaaccaattattgctgtttaaacggcagtaagctttcgcattgcgctttatagagcgccatatgttggcgttctctgcgaataaaatcattaatggctgctgcaaaatcaccgtgctgaatatgatgcagtgaataggtatatacgggcttaaatccgcgacttattttatgctcaccttgcgcgccagagtggaactgtttaagtttgttggcaatgcagtactcaatgccttgatagtagcaaagctcaaagtgcaaactatcaagctcataatttgttccccagtaacgaccatataaacaattctgatctttaaaactgagtgtggcggcaatcacctctccttgatacttagcgaacattaacaccagtttgtcggccatgctctgctgtaataattcgaaaaaggcgttattcaaataaccattgtgacctgagcgcttcaaataggtttggcggtaaaaatgactaaattgctgcatgtgctgcttgctgatgtcagtaccttcgagccattctatgactatctgttgttcagttattttagcgcgttcttttttgagcgatttacgctttcttgcggtgagtgaagctaaaaaatcatcaaagcatttatagtcttcattaaaccactgaaactgcacgccatgacgttgcattacggtgtcgctagttaatgcagtagcttgttgctggtggcaaaaatttatatgccaacctgaccagcctaactgcgctgctgttgctgtgagtatgtgctgaatgtaagcaaagacttcagcgggggctacatatttaatactaactctttgccctgcaataggcgtgaatggtacgccacacagccatttagggtaatattctaagccatgctgttgataagcttcagcccaagcccagtcaaatacatattcaccataagaatggtgttttagataccccggtagtaaggctatgacctgttcttgctggtaaattgctaagtgcatgggttgccagcccgactcctcactcacacagccactttgttctagagccgctaaaaaagcgtgatcagtaaagggtgtatcatcaaaaaatgactgccaaagtgcggcatcaatctcgcttatttgattaaaccagcggtgactaaactcactcattgtgcagccgattctatatctttgatgaagttgttgatatgcatagctagcttatcgaaataagggttaaacgtgagtcgtgcaaagggtttgtgtgcttgtaaattttcggctgtgcgctcacccatcacgatgtctttttggtatttgcaggctgtataaagcttatcgtcatctaagtagctgccgcaattgcgatacggagctttacggccatagtaagggttactgggtttattaacgataccaatgtgtgacatccctttgatctttttacagtcatcggtatcgcagtcattacggattatgtggtaatcagcaggaaagttggctggaatattatcgtcgtcaccgtagtaaactagccgatcaagctggttatttttacgcgcttttgggtcgtgcagtttagctagtaatttaaaggtcgcttgattatctattgtggtatcaacatcgctaaaggtgctaaatattgcgatattcggcagttgacgataacgaagctcatcaaggctaatacggctcattgcttcgtggctagctgacgctgcactaaatggaaacgactcatacttagcaaaatccagatccgcgtctttatcaatccaattaacaaatggaattgcatcgatccatttggccaaccaaccgtttttattgtgtggctcacttgctggtgaaaacaacatcgcagcagtaattttattatcaacaggagcttgagttaagtaatcaacaaccagtgctgcacccgttgagtagcctcctaatattacctgatcaaagtcttttaatgtgcgctcaatggcatacacactggcttttcgccaatcatcagcatcaacctcttgcaaagctgctgcggcagtaccatgccccggcagtaaaattgtgcgaactgtataaccttgttgataatacacctgtgcaaggtcatggtaggtaaatggagagtcggttaaaccatggattaaaagtacagctttgtggctatcggcctgtttaagttcgaatgggctaattaaatcggcaattgttgcgttagcaggtcgagaaccttgtgcaacaagttgctgataggtatcggtataaactgggcatggtaagttcgctcgcggattttcactgctaatttcaaggtaagcagcggttaaatagtcactaaatgcttgctcgatattatagctaaaggtgctatggctgcgtggtaatggctctctaaacagtccttcgcgcttacttttcatcatcaaagcttggtcttcaagctgagaaaggcaggtttgctgctgtgccattaatgggctgctaaatagtccactgatggccaaagagatagcaactaagtttatgaatttcatattttaagcgtccttttaaagcctgtttttagcttatcgagttatgttttatttgcaagcaagctgcgtcaagctagcggtaaatggcgcttagtgaatgcttgttttaagaccaccgtcgactcgatgttcgcaatgcaatcaatactacctaatttatgtttcacaaagctttcatagctttctaaatctgtagcaacaatcttgagtagataatcataactacctgaaataactgagcactcaagcacatgttcaagttttgctacttgttgttcaaattgctcagcagcggcaactgagttttggtttaagcgtacaaaggcatacacagacacgtttaaattaaccgctttaggattaattgcagcatggtaaccactgatcacattcgctgattcgagctttttaatgcggcgcaggcaaggggtatctgacaggctaaccgactgtgccagatctgagacagaagttcttgcattgtcttgtagagcattaagtaattgttggtcttttttatctaatttcattttaatttgagtgattttcactaatctaggtggattctagtctatattttggcgattagcactcattgaactctgttaacattatcgcaatataattattttggagtgagcctgtgactgagaacaccaaggcatttgatagctggcttcgcactcgttttgttgagatcaatagcgaactagaaaaactatattggcaacaagacgataaagcgaatgtagagggtgtcggtgagcaccttaagcgtcaattagagcaagaaggtaatgagcatattcgtgctttacttgcagagggtaataccgatgaagggtttgataacgctttcgacttattaggtaatgttggcttgtatatggcggcatgccgtcgacatgagatcactgagccttctcgtgaaacaagctcaccccttgttgaagcctctgcattggcaatgcacatcggtgcatctattggtgttaccccgcgttttgcaacggcgcatttaaccacccacaacaaagcggttgatggtttgtataagcgctttactgaccttgaagatgagaaaatctttgttgattataatactaagggcattttagcgtataagcgtgcagcggatgctttattaaaaattcagccgttaggaatatcgcaccctatcacggcagatttacttgccgtggcaaagcaagcactgcttgatgtaattgagtcgaacaatacgttatacaacaagcttgatacagaccgctttttctattgtgtacgcccgtattacaagccttatcgagtaggtaaagaggtgtatcgtggtgcgaatgccggtgattttgcgggcattaatgtcatcgatttattacttggtctttgttttgccaatgaacctagctactcgcaaatgctggtggataaattcttgtatatgatgcctgaagatcagcagattctgcgtgaaagtatgcgtatgacaagtattatggatgactttttagcagcagaagctgagcgcgatagcgagtggctacaaactaacttaaagctgtttattcaagtgtgcaaactgcatggtgatactgcgattggtcaccataatcaattggttagtaaatacattgcacaaccttcacagcaaatgcagcaacaacatatggataaagttactgccagtgggccgcctttacatgtattacttaactcattagagcagttacgtgatcgccgtgcggcagcaaagcgggatgatattcgcacccgtttcgatgatttaactaagttaaaacagtggattaagtaatgaataaagacgattttgtaattccacaaggcagctatttgcttaaccactctgttgggcgccccttaaaatctgctgagcagcattttcatcagcagttttttgccgcttggcaaaatgaaaataaagaaccatggcaacagtggttacaaggtgtcgaggcgtttacgagtagtctcgctaaattatttaactcgcatagtgagttattttgcccacaagttaacttatcgagcggtttaaccaagctgttgatgtcgcacccgcgacttcagcaagagaattgcaaagtgttaatggcagaaagtgactttccaagcatgggttttgcaatgcaaaaagccctagcggaaagtactgaaatcgtgtttattgataagcatgaagatttaaccagtgcgcaggtttggcagtcatatttagcgaaaaatgatattgatttagtctttattagccatgtttattcaaacacgggtcagcaagcgcctattaacgaaattatcaatatcgcaaagcaacacaacacattgagcttactagatgttgcgcagtctgcgggtattttagaggtcgacttaactaagcttgatgccgattttatgttgggctcgagtgtcaaatggctatgtggtgggccgggtgctgcttatttatgggttaacagcaagcagctatcactttgtcagccacaagatgttggctggttttctcatcaaaatccgtttgagtttgatattaagcactttgcttatcatcaaaccgcgctacgcttttggggtggcacaccttcagttgcaccttatattttggcatcccatagtattaattactttgctgatcttggtattgagaaagtacgtgctcataatttagctatgctcgcgcagtttcatgatcaattagctgattatatgcgctcacccatacaggctgacaaatgttctggaacggccattatgcattttggcgagcaacaagcggctgttaaagctgcgcttattgcagcgaatatcgctgttgatgagcgtcacttgggtttaagagtctctgctcatatttataatgatcagcaggatattgatacatttatcaagactgtgaaaagcgctttaaattaagtgcttgtcgggcttttgctttgactgaacgccagtgcgtcattggtttttcggggaccagcgctaaaatttgctcaaagtcgatgtcatcaatacccacttcgttactgtgggcaaacataatccgttttggttgtaaggcttttaacatcagtaaagagtttaaatacagctttgggtaaaaaacaggaaagggtggcacgagctgcccttttacttttaccagtaaatcagcaatgtaaattctctcgctgggaatatggtataagctgatatctcggtcggtatgacctgggctatgcagtgcttgccaatcgtcaaagcccggtagagttgcatctgtggcaaggtaataatctgcatctaaatggcggctgtaccaaaggttgtggcgttttttatttaacctccccgcaacccaccaagccaaagcgatatcggttaaatgcattaagaagccatcaatacctctataccattgcccaggggcattcgacgttgctattttgccaccgcttaactttcttaatgcatgcgcaccaccggcatgatctgggtgcatgtgggtaactacaattagttttaggtcggtaacagggcgctttagttgctcggtgatataatcaaacacggtatcaacatcggcacggcaacagccatcaagcagcattagtttgtctggatattcaaccaaatagatgttttgaatataaccttctaaagtatgaatgtgcattgctacataaggccttaataatttaataaaccctgttatagcatgtctgaccagtttaggtaagttagaagtcttgcttctctgtaagtagccttttactctcttctagtttttcaatctgcttatttatgatacttaactgactgttatagtaggcattgatgcgctcactttgttttttaatggcatcatcgatcgattctgcacctagtctatttgcagcatcttgggtcatttcgtacactttttttatacgctcgttttgctttttttgtaattctttactttctagttttaagcgctcaatttcgcgatcagcttctttggttttgagaaagttttcaacacttagctcatttgtctcttgcgttttttctggtggtagcttggttttgggtggtggagtgatattaactatttcggcatctttaccacatggttgctgcgaaaacgtggcaacattatcgatcatgcatttatagatcgtggcttggctgtaaaagctgagcaacaaggctgcagcgaaagaggcaaaacggagcatagcactaatcactttgactaatatatatacatttagcatgcatgaaattaactgaagtgtgcaagttttttaggcataaaaaaaccgctaaaaagcggttttaaataataaaatggtggagaaggagggattcgaaccctcgatagagctacaaaccctatactcccttagcaggggagcgccttcggccactcggccacctctccaacgcataattctgattgtaacttgctgaaattaatcaacaaataaaaataagtggtggagagatagggatttgaaccctagaggggctacaaacccctgccggttttcaagaccggtgcattcgaccactctgccatctctccacgtcgtgatgcgagaataatacttagctgaatcggctgtgtaaataggaaaaagtttgtttgcttgttttttgagcgtaataactgcgttttttgtaaaaaggtttaattttttgctgtttttgacttaaaagaagagggttggggcagtaaacggaggagctaaagaaggatcttcgttagtggttggttgtttactgcaccgataaagtaaccatggttgggggttacttgtgttgtactgcgccgccaagtgctaactttttgccgtagcgattaagctttgccaacatttttgctttgcggtttgttggttttacggcaacatgagctgctgcgttttggtttaatgtattaattgggttcattactttgctccgggttgtgtttggttgaaaacgtgagtattttgcaaccaaactgaacaaaaataaaacgataaaaattgagtctgccggataactttttctaatccgaaagtcttttattaacatggggttaagtttttatatctgcagagatttgcatgcttatgcagttgtttttgtgttgaagtgtcagtaaataaaaggtttttaattgttgttactttgatttatgcgtttttagagtaagaaagtgactaattattcagattaatataatttgaacgagtgtggtgtttttaccatgcaagaaaagaagtgccattaatgttgataataataaagccaagtgacaaaaaaaatcataaaaatagtgttgattggctactaaaagaatgtaaaaaaagacagattgagcctgagttatatttaaccataggcaattttcttcaagattgcgctaatattgcccttttagctaaaagccagacacaagttgtggtaattggtggtgatgggacgctacatttagctgttaatgcattaatgacgagcgattgttctatcgccttaattcctgcaggtactggtaatgattttgctcgcggctttgcgcgcaagcagcaagcttggcatgacgctgttttcaatagccgtactgagctcattgatattgggcaaataaatcagcgttattttatcaatgtagcggggataggttttgatgctgaggtggtaactcaattaaacaaagccggaagttttagctcgtttggctacacttggcagggtatcaagcagctattttcatttcaggcacggtcacttcagggtgaatttaatggtagaccacttagctacagtaatttagcgacgatttttgccaatcatcattactttggtggtggcttaaagattgctccccgggcaaagttaaatgatggtcagcttgattgttactgcatgccagcagatggtttgttgaaaaacctgattagctttttatatttactacttgtgaaacatcatagtttaaaaaggctgaaatatacctgtttaacaactgcggaagtaaccaccaaagggcttagtattgaggctgatggagagctcgttggttttacaccagccaaagttaaggtgcacaaacaagcgcttcgttttcatgtgccataaaaaagcgccggcatattttgccagcgcttggtgttagaggtgaccttgccacatctaactggggacggagcttttttgctgtaggttacgtgcagcaaaaaatgctttaatttgtcgagttggagttagcacgatagcattaccgaataacactaggctaaagcccataaaggtattcgcttgccattcgaatccttcaaataaggtacttaataccactgcaaccagtgggaataatacgattacgtagcttgcgcgctcagggccaatatttttaagtagtgcgaagtaacaagcaaatgcgattacggtaccaaacacagctaaatagaaaagcgatacccaataaatggttggggcattcaatgtaagctcaacatcgcttactaaaacatacgctgctaggcctaaagcgctgtataacataccccaggcattgccctgaagtacgccaatgtttcgctgagagtttcgaacactgaccatattccccaatgaagccacaaaggtcccagatagcgcaagtagtaacccgaccaacgcaccattactcaagtcgaattgctgaatttgtggccaaaacaagcttgcaatacccattacgccgagcagagcaccaaagtaaattcgtttcgcaattggctttgcgaaaaacaagcgggtgttaataatgttcatcaataacaacatcgaaaaggcaattgaagccattgctgaggtaaggtagttctgcgcccaatacagtactaaataatttaaaccaaagttaaataaagctaataatgcaaaaaagccgtgatcacgcagtgaatattgcataggaagtttttttacgagcacaaaggcccacattaaaatggctgcaatggcaaagcgataaaataaagagacctcaacagcgacatcacccagttgaaactcaatagcaagccaagtcgatccccagatcagtactgtagcaaggtagagagcagcgcttttcatagttagtacctaaaaattgaaagtgtgttcattttaaatcgcttctgtatacttaacatatacagaaaactagaaatgcaacctatacagtttggtgggctatgtcacaagtaattagtcgtagtaacagtgagttcttatatcaacaagttattcagttagttagagatctttgtttgcaaggctcgttattaccaggtgaaaaattaccttcactcagaaaaatggctgacaagcttaatattagtattccgacggtaaaacaagcgtatcaattacttgaaggacaggggctaattgaagccagagaaaagtcaggttactttttaaagtcttcacaattaaatcagtcgcggccaaagcgagtcaggctgagtcgagaacctaccacagtcaacaaacaaggcttaatagaacaagtatatagcgctatccacaaagctaatgtggtgccatttggtattgccaatcctgtggccgctgcaccgacagataaagcattggcaagaaccatgcgtcgggtaatgacactcgctggggcatcggcaattaattacggtccgatggatggctttgcaccacttaaaaaacaactcattcatcgttatttagacttcggcattggggttgatagcgatgaattagtgatcaccaatggcgctcaagaggcgttggcgatagcccttaagtgtgtcgctaaacccggagatgttattgctatcgagtcgccttgctattttggcattatcgaattaatcgaaagcttaggcttaaaggcactggaaataccgctgtgtcctgatgaaggaatatggctagatgatttggctcaagcactcgatgagcatgatataaaagcctgtgtattttctacctcattaaataacccggttggcagctttatgcctgatgccaagcgtgaacaattggtggcacttttagagcagcgcgatgtcgtgcttattgaagatgatgtatatggcgacctacattttacagctaagcgagcgactcctgcacaagcttattcaaaaaagggtttagtgatcacctgcgcgtcattttcaaaaacagctgcgccaagttaccgtattggttggatcattgccggtaagtttgctgaacaagcaaggcgctataaaagggcgcttagttgctctgcgccacttattaatcagtggaccttgtatgaatttatagccactggcgagtacgatcgtaatattcgtttactaagacagcgcttaagtaccaacaaagagcgtatgatttggtgtttgcagcagcacatgccaagttgtgcacgcataagtaacccgcaagggggttgtgttatttgggttgatcttggtagccaatatgatgcggtaaaattatttcatttggcacttgaggcggggatcagtattactccagggctgatattttcagcgggtaaaaagtaccgtagttgttttcgcttaagttatggcttgccttggtctgaaaatttagagcaggcgattaaaacgttatcgcaactgactgtgttggccaaaaaataaaaaagcgcagagcaagctctgcgcgaaaggaccaagtgttttggttcagggatgttaattcattactctgcgttttgtttgaagataaaaagttgatactcttttagttctggtactagcgccactaactcttgctctttatgagcgatatcagcaaagctgccgcataatgcatctgcacgctcttcaagttgagctgcctgtgtttcaacgcgcgcttctatttgtgcgcccatgttttccatacgttgttcaaactcattcatgtcgccacccgaacctaaaagttcagagcctagcgcgaccaaaatactgcccattgattgcatcatggctgattcaactgctgattcgatttgctcatcgaattggtcttcaaagttttgaccaaatttttcaaaattttgctgacccattgtgaacgcaccttgttgatagaaggcgttttgcacttctacgctgatatcgtccattaattctgaaatgtcgtttaggccgtcaatgttgaaggcttttgacacttcttcaattgctacgcctgctatttttacgccatcaagtgcgatatttgctacttcaggaagttggctgcgtaagctgtctgagtaatctgcaattgcttgctgttgtgaagcatcaagcgatacgctttgaccatcgatatacaaagtgtgctgatcgatgattttcatagagcgattatcggctgtgtatacttctaactcgcttggtgtgatgcgtacatcatttttaaattcaacatcacattgctcaccgctgaatgaaatatttgtatcattatcgttatgagccattgcgctggtagcgataaataaagaacttactaacaataactttttcatttttttctttcctgtttgaaatgacatttagacataatcaaacttaatgccaaatttatatttttattttatttcatagggttatcattttattaagtgtagttagaagttatgagaattaaatttttaactaaaatttggtcaaattaactaaaaaataaacatgcataaatgggttttatcgaaacgataaaaaactctcacttttcagaatccgaatttagcgctatttattcacaatattgacatatcacccatttagcatggcgatatggctttattttggtggttttttacatactaattaatcactgagctttttaaactttgccaattcacagagcaaactttaaatttgtgaaattggtctcaaacactttatggagtgggttgtgggtaagacatttagttatgatgcgctagatgacgattttgttgaagacgagtacgaaatggttgggcgtaatcaacatgacaaaaaaaagcaacgcgttaagaagaagctagaagattatcttgagcaaaaacgcttacgcagaaacttaggcgaagacgactttgacgagtacatgaacgactaagcataaatttaaataaagaggcattttgcctctttattgcttattggcatgtgattttatttgtttaatgcagcaataatcgcagcttcgatctgctctggttttgttaaaggagcaaatcgtttaatagctttgccatctttaccaattaaaaacttggtgaagttccattttattttgcgggtaataaacccaggtaactctgattttaggtatctaaaaacagggtgtgcatgttcgccatttacatcgaccttgctcatcatcaaaaagctaacgccatagttaattaggcagccttcttttatttctttagcatctcccggttcttgcttaccaaactgattacatggaaagccgataatgacgaggccttgatcatggtatttttcgtggagtgcttgcaagccttcatactgaggggtaaagccacatttactcgccgtatttacaattagaacgactttattttcaaagtcattaaaatcaatagtttgaccttgaaggctggtggcactcagttgataaaattcactcataggtatcacttattattattgttgaattaattctaacccgctttagagaggtataaaagtataaattttaatcacactttataccttatagccaactgtgagcagtgttagagttgatgtcagttttttaaactcaaagtatgttgctctgaaaggccaaaagtacaaatttggcgacaaaaaagactaacttaaaatgataaatagccccatgcctgcaagcgtggtgtaataaatgttatgtgttttatatgcgacaataatggctaatacagccgcacttaaataagggttttgccaatctaagttaatctctccctcatttataaagacgatgggtacccaaattgcggtaagtaccgcaggggcgctaaaacttaaaaattgctgcattttcggaccgactttaaacggtaatgcgcggtgcaaaaataagtaacgtgtgaaaaaggtaatacacgccatcaataaaatggtggtcatcatagtgtatgctcctcttttgcttgccagcgactaattaaataacctactgtcatggctattagcgctgcagtcactaaccatagctgaaagccttggctttttaaaagcgtagcgacaacgcctgcggtgagcacagtagccaacgtagcaaggttctttacacctggaataactaaggcaataaatgtggcagcaatggcaaaatcaagcccaaggtctgttaagtcaggcagtaagctacccgcgactatgccaagcaaagtccatatattccacgcaatataaaaactaaaccctgcactgagcgcgtaaataaggcgcacttttgttcggtaggctttgcgatggtgcgaaaacgcaaataattcatccgtgagtacaaagctaacaggaaggcgccaacgaaaaggttgatcaatgactttgtggcgaatagctaaaccatatagaaagtgccgcgagctaataatgagtgtggtaaacaatatagtaagcaaaggggtattgccggccattaattcaattgcgactagctgcgcagagcctgcaaataccaacaatgacatcgcttgtgtttctaaagcactaaagccattttggacggctaacgagccacataaaatgccccaaggtaacaccgcaaggcacaaggggagcatgtcgaaaaacccttttagtaatgctcttattgttgatttatgcattttatcgctcatgtttgttgttgtggctcagatcaaaacagctgaaatagaggtgtgtcaaaataactgaagtttgtaataatgtatagccgaacccgttgctgaaattcagttctgcaagttatgataccaatccgcaataatacttaatcattttgagggattaaacctgtcgctatctgcgttaaaaatttctgatttagaacaactaaataacgaaatttttgccttgctatctacgaggttttattgcctcaaaatagatcacttaattaagcgaattggtataagcatcttttaaaggggaagttacaatgtcgaaagttaaagtatgggatggctttataagaagcttccattggttgttagttgcagccatcgcaacactctattttagtgctgaagagggtatgttagagctgcattttgcagcaggctacttcaccttggcgctgattattacacgtcttgtttgggggcttattggtagcaaaacagcaaagctctctgctcttattcactctcctgttgctgcaattaagtcatttacaagcaatgagcataaggcaggtcatggtgcggcgggcagttatatggtgattgcattttttgttttaatacttgtgcagttaacctcgggacttatgaccagcgacgatatcttaacagacggcccgctagtcgcacatgtatcatcagataccgtagaatttgcgggatggttgcatcatttgaactttgatattttgttgtatgccattgtgttgcatgtattggcaattgtgatttaccgcattaagggaaagaatttagtcaaacctatgctaacgggcagtagcgaccaggtttcagtcactgagcctgtcactaaatcacctatgctcgcttttattatttttgctgtgtgcttagtggtgctatttacaacttggggcgcagagccgctcagttatttgcttgggtagacctctcaagatactaaaaaggcgcttatcagcgcctttttagtttacataattactagactagtctttgaaagacttatggcaatctttacagcctttagcccatgcgccaaatgctttaccaattactttttcatcgccactctgtgctgcaactgctagttcatcagcatattgttggaaagcaactgcttttttcataaaggtttcgttatcgctccatacagcagcaagtgcagatgtatcgcctttatcagaacccgcgacaaaagcttcccaaggcatttttgatagtgcagctgcattgttggcacgcttttgaaagcgttcagcatcaaaaggtacttttccttttagcatatcgcccatgtcaccaatttgtacgcggatcattgaaaatgctgcctgacgatactcaattgcatcacttggttcttcaaatacagaatttgctgatgcgcctagtgccattgtagatagcattgcacccaatactaattgttttaatttcattccttttgccccttaagatgtcataaaagtaaactaactgagttgtatcttagctcaatataatattcaagtgtattgcggtttactagggcgtatttacctttgtggattaaatttgttcactctaggggcgatttaatcgcggcgcgagatttgtaacctagtgggctaagtaaaaatcgagcaacaaagagttaatcgcccctaggaagaacccgaagggcagcgcgtgtttggcattgatgctgcgttatcgcctatttatgtggaacaaccacactacataggctctgccttgcctaaataccaaacacactgctgcaaaattaatcataaaaggtcaatacgccctaatcatttatatcaatatcggcgaatatcatcccgcggcgcatacttctggttgctaagaaaacctcgcctagtaaagataaaaaaccacagatcaacagggccatagcggccacaaagcaactggcaattgtcacgcttaggttaatagattggatatgtgatagaaataaacacataaccacagcgcacactaataaggcactaagcacacttgcactaaatgcaatatggatacagcgcgagcgctttaataacgctcttaattcagtcgttagagacttattaaagtcttcatcagtactgacctttaacttacgctcaagctgccttgcacggtcggtaatgcgggctagacggttagataacacacctaatgtggcagcaatacccgtaattaagaataccggggctacggctgtttgaatcaccttagccatagtaagaatattaataacctctgagttcattatgtttacctttttgcatttgattcatttacaaatatttacaacccatgctttttcattaaacgcttttaaaacaaagtcttgtcagtttttttctcgcatctaataaatttactgtaactataatgtaactgaaatgttgttcttgagtgtgtttacgctttatattggtgatgaaactttgtttcaatcactatttaggacgataaaataacatatcccaggggaacccatgtctaaaaatctaataaaaagaacagcagttgctttggctgtaacaagtgcaatgtgcgctagtgcacaagccaatgacttttcaaaatacaatctagcaggcaaaaagttaattaaatcaagtgctgttactaaaaaagagcaaaaagttcgcagcgaagcaacaagttggttagttaagttaaatgcaccagcaacagtaaatgcaacatcacgtggtgcagatattgcgagtattcagtcacaagcacaagcggcacaagtaagtgtagagcaagcgattagtagcatggatttaccgctgcaagttgttgcgaaaacatcaacacttgtcagctcaatcgtagtcaatggtaataagcaggacgttgcaaagcttctctctaacgcgcaagttgagggtatctaccctgtttatgattatgaattgcatgttgcagacagtgccgattatattgaggcaacacctcttgtcgcgaatggtttagcaacaggtgaaggtgttcgcgttgcggtacttgatacaggtatcgactacacacacaaagcattcggtggtgaaggtactgatgaagcatatgctgctgcgattgctgatcctgcatcagttgattggccacaaggtaaagttttaggcggttatgactacatcaataatgataatgatccaattgatgtagatacaaatcatggtacacacgtttctcactcggttaacggtatcgcaccaaacgtagatttattcgtttactctgtatgtaatagtggttgtcctggtcttgcgcaattattagcgcttgaaagtgcaatggacccagatggtaatggtgatatcagtgaccgtgttgacgtaatcaacatgtctttaggtggtgattacggtgatattgcaaatgatgctgtaggcttattcatcaaccaagcagttaaactaggtaccaacgtggttatctctgcaggtaatgatggcgcatatccatttatcgttggtggcccaagtaccactgagcatgctctttctgttggggcaatgactcaccctacaggtgctgagtcaattggtagtggtacagttaatggcgaagaagcaattgtgcagccagcaagttttggtcctcaaactgcgtttagtttctcaaatgacgatattgaacttgtttacccagatgcgaaccaaacagcatgtgaagcgtttgctgatgacgtagattttactggtaagggagttatcatcgaccgtggtgcatgtgcatttacagttaaagtattagcagcacaagctaaaggtgcagagtttgttattattgcaaacaataacgatgatggtacgccagctcctatgggtggttctgatccaagtgtaactatcccttctgtcggcgtaacatttgccgcaggtacagcacttaaagcaggcggtacatttaacctaacagttgaacgtttagttctttctggcgctattgctgacttcacatcgcgtggtccttcaatgggtggtctgttaaaacctgaaattacagcaccaggtgtaaacatcatgactgctcacccaggtttaggtgatggtcttactggcgcaacaggtacttcattctcaggtccaatcacggctggtgcggtgagcttattaaaagaagcactgcctgaacgtaatgcacttgagttaaaagctacgctaatgaataccgctaacctcaatgtcacaatggagccattagcgattaaccctgatgctgagcttgcgccaattagttatatcggggcaggtttagttgatgtaaataaagcggctaacttaccagttgctgcgtgggctgcagatactaaacaagctgcgctttcgtttggtttagtaaatgcatcagaaacagtagaactaactaaaactgttcacgttaaaaacttctcaaatgaagcaaaggtttatacgctttcacttgaacagcgttatcaagacgatatagaacgtggttcattctcacttgattacccagaaacaatcacagttccagctggtcaaatgctgtcatttgatgtcactgcgacaatcgacccgacaacattacctgagtggactttgactgatgacaacattggttctcaagactcaacgacggatttaacgaaccttgagttagacggtgcgttaatattctcagatggtgacgagaaagcattccaccttgtttaccacgtattgccaaaagcgaatgcagcaatgagctttatgccagtcatgactgatgatggtgttgctcaccaactgacaaatattggcgctgttgctttagagcctgtgtttgcaccaacggtagcgactgatgaagtcgatgaagatcaacgtttagacttggttggcgcatcgattgaaacatttgcagtaccagcagaggtctgtgatagcggttatgtaacattaacaactatggtactaaatgatggtatcactcactcttatgtgggtggcttcatggctgacttcgaccttgatcaggatggcacgtacgacgttacagtacaaaatggcaagttagaatggttctacgatgttgagccaggcactgctattaccttcactcatggctacggtagctcttcaggtaatcttaataacatttaccaaattattggtaataaccatctaacgatgcaaagttgtttaggtgcatttggtctaacggctgatgatattggtaaagcaactgcaaatgtacgtttccgtacagaagaagaaacttggactccaattgcatcaggcgaaggcgatgttgcaatgggcacatatacattcactgatgcatcaaatgatgtctatgcagcgcttgttgatgaatctggtgaggctgtaagttcaattgaaccaggcgcttcagcaacattattgaatgctggtgcagacttcatgatcctatctgattctggttctaaagcatacgcagcaacaccgagtgcagatgctaatacagcgcctgagcttgccgatgcttcgttcagcgttgatgaaaatagcgcagaaggtactgttatcggtatgcttgaagcgacttacggtgctgaacttgcaaatccaatttctgagtacatcgtactgagctcttcttctacagcggtttctgtgaacgcggctggagaagttgtggtaatgaatgcagagatgctagattacgatgcaggccttacgtctattgagcttgaagttgttgctgcagattctgcaggcaatatctctgaacctgcgatggtgactgttgaagttatgaacgttgctgacgagccagaagaagttaacccagtaatcgatgctgatcttggtgagttcacggttcaagaaaacgcagcagaaggtactgtaattggcactgtgactgcgactgacccagatgcagatctgactcctatcgctacttatgaagtgacaggcagtgatagcatcagcatcagcgatacaggtgagttaatggttgcgggtgcaatcgattatgagcaaacaacctctatcgaagtatcagtgacagcagttgactctgcaggcaatatgtctgaagcggtgacgattactattgcagtaacacaagacccggcagaagatgttgtagctgaagaacctgcgaagaaaaaatcttcttcaggttcgctagcatggttaacattacttgctgcgccgttcgcatttatgcgtcgtcgtaagcaaaagtaattgcttgataagtaactaataaagggagcttcggctccctttttacattgcttcacaaaggctacttataaattcacggttaattacttatattagggacttaataataaaaattaattaggatccctatgaaagttggccattcactttgccttgcggcactctctttagctgttctatcagcgtgtaataaagttccagataataaagaacaagcaattattacagagcaagttcagatatctgctcccgtcgccaaaaaaataccctatgaaatgaccatccatggtgatactcgtatcgataactattattggatgcgagatgatgagcgtaaagatgaagccgtcattgcccacttaaatgctgaaaatgagtatgtagaaagtatgctcgcacacactctgccattgcaaaacaccctgttcgaagagcttaaaggacgtattgagaaagatgacgatacagtgccaaccaaaaaaggtgattattactatttttcacaaacgcgcggtgatgacgaatacccggtttatgtgcgcagcaaagatagccagggtgagaataagcaggttatcttgaacgtaaatgaccttgctaaagatcatgattattttgctgtaacaggtttggcagtgagcccaaatggcaatttgcttgcttacggtgaagatacggtgagtcgtcgtatttacacaattaaagtaaaagatttaagcacaggtaaaatgttgtcagagagccttgaaggcactgaaggtgaagttgtttgggcgaatgacaacaaaaccttttactacattaaaaaagacctacagacactgttaggctaccaagtttatcgccatacactaggaacatctcaagccgacgatgagctagtgtatgaagaaaaaaataccagttactacacgggtatttcgaaaagcaaagatcaacaagaaatctatattagtcatggcagcaccagtgcctcgggcatctcggttattgatgccaatgatgtaaaagcaatgccaaaacgttttattgaacgcgaagcagggcttgaatacgacatcaaaaaattgggtgattggtattatattgttaccaatttaaatgcagttaacttccaactgatgaaagttcaccgcgataaagcgcatgataaagcaaattggcaaacgcttattgctggtcgtgatgatgtgaaacttgaagatattgagttattcaataatcatttggtttacgaagagcgtgaaaagggtcaaacccgtatcactattcgcgatcttcgtaaccaacaagagcaagtagttgcttttaatgacccaacttacatggtttttagctatggtaatagtgagttagataaccctaacttacgtgtttactattcaagcatgacgaccccaggtagcagctacgatatcaatcttgaaaatggtgaaaaaacgctactgaagcagcgcaaagtgttaggtgactttaacccagacaactatgcctctgagcgtgtttacgtaacgacccgagatggtgttgatgtacccgttagccttgtttatcgtaaagacaagttcaaaaaagatggctctaatccacttatgcaatatggctatggctcgtacggtgcaactatggatccgagcttttcaagctcgcgtttaagccttcttgatcgcggttttgtatttgcaattgcgcatatccgtggttcgcaaatgttaggccgtccttggtatgaagatggtaagttgctgcataaacaaaacacctttaatgactttgttgatgtgactaagtctttagcggctcaaaaatatggtgataaagataatatttttgccatgggtggcagtgctggtggcttgctaatgggggctgttgtcaatcaagcacctgagctttataaaggcgttattgcagcagtgccttttgtcgatgtagtgacgaccatgcttgatgccagcttaccattaacaacaaatgagtatgacgagtggggtaatccgaacgataaagtctattacgattatatgttgtcatattcaccatacgaccaagttaaaaagcaggcatatccaaacatgttagtcactaccggattgcatgattcacaggtgcaatattttgaaccggcaaagtgggtggctaagctacgtgaatataaaactgatgataacctattactgttcaaaaccgacatggaagcagggcatggtggtgcatctgggcgctttaaaagcttgcaagataccgcgttatattatgcctttatgttagatttagcgggtatagaaaaataatcacccatcaggcatccgtgattaagcggatgcctgcatggttaaattaaagcgaaattcactgccttttccaacagtactttgtacttcgattttactattcattagcataagtagttgtttacatatagctaaccctaatccggtagagccacgttttatactattgcgagcctgataatgtggttcaaaaatcgcagtgagctcgtcggcatgaatgccaacaccagtgtctgataccgctacaaatagttcgttagcttgctcagaaacgctaactgaaatcactccgccatctggggtatggcgaatagcattttcgattaagtttgttagcactcgttctaacttggcaatgtcagcagttactgtgaaatcgcatatctcagggataaccttaagtttaataccggcagagcgagcggttaattccagttttgccacacagtcataaattaactcgcccaaattaaatgtttcggcatttatttttacttgcccgcactctaagttagctaattcaaatatttgctcaatgagttgttttaactgttggcaattatccatcgctaaatttagataatgttgctgctcttgctcacttaaatggctgttaggcttattaattacttcgataaagccatgtaatgacgacagcggtgttcttaagtcatgagagaggtgggttagtaattcgcgacgctgcttatctgcatgctgtagggattgaaattgctcatcgatgcgcgacaacattgcatgtacgcctttgcttaaattaccaatttcattgttacccgtgtaacttggtctgagcgacatctttgtcaggctgtaattggccgcttcaatctgacaaatttctttgttgagttgttttagcggtaatgtaaagaacctaaataatattagcatggctataaaaagcgcgagcatagctgttataaaccaagccgcacctagccacagtgcatcattttctttgatattgtttaaggttgtatcaaatgcttgaccaccaataataacgtataaatagccttgcatttgttgttgattaaacaccggggcggcagagaaaatcttttttgcgtcctggctacgtggatcgtcaccataaataggtgtggcagtggggtcgttaatgagctttttaatgggagtaaggttgatctgttttttaataacttggcccggttttgcagagtatgtaagtaattctccgcgagggtctacaaaataaaattcaaagttggggcctaatatcatcagggtatgaaataaattctctaaggcttcataatcatacacgccttgttttattaagggattgtcatgaacgagatgctcagccagctgtaagtgtaagttttgctgtgcatggtgctgcgaagtttgctcaagatgcttgctccaactaaatactagggcacatagtaggctaaaaataagtacaagcgaccatgcgagcttttgatagagtgtcattgttttcattagtgtgtgctcagttgcgatgggtttagtttgtagccaaccccccataccgtttcaataaagttgctagcgtgatactgctcaaacttactacgcagacgatttatatgtgaattgactgtatgttcatagccacagtgttgatacccccaaacgtgatcaagtaattgctggcgactaaatacatgatttgggtgtttagcaaaatacaccagcaaatcaaattcggtggcagtaagattgattgcttgattagctaaaaaagcctgatgacttgaaaactcgatatgtagatccccaagttgaatggattcggcattatgcgcttgttcattagttgattgtgcgatgagcaattgtgctctatggcgcagttgtgttttgatccttgcctgtaactctctcgcaaagaaaggtttgcaaatataatcatctgcacccatctctaaaccaattacccgatccatgtcgctacttagtgcagtcaataagatgacagctgtttgcggatagtgctctttaatttttcgacataagctaaggccatccatttgcggtagattgatatctagcaacaccaacccataactttgattagccagcttttttatcgcggcctcagcacttgctgtttcgtcaatgtgcaggtttaagctagtcaactgggtggtgatgagttggcgaatggttttatcgtcttcaactatgagtaatttttcagggcgcatcgtttaatccaagtagctaaggcacatccttatgaccttagcgtaaggagtgcgattgttattgcgtccgcgttatgactattcgagcaacggggttatcaaacttgtattggcttgtaagcactgagcttgctaaaccatcatcttgagttacaactcccgggtgcattgctacacgattaatgtcgtctcgcatttcgttaaaaccttcacctgaatcagccggaccaggaatagtgccagcagcttcagagttggcttcagtgccagcatcataggaaaaactagtacgagacagtgactcattaaccgctaacgaagacacgtctatagcattaagaccggtaaacgcatcatttgtattcactaacatagttgcaacactgatttttaatgaatcaagctccccggttgttagtaccatagtaacctgttgacccggtggtagtgggctttctgcagaagcggattgcaaattgtattcactggctaaaagctcgctgttgtcgccgccttcggccattaattcaagagcactagaagctggttcgccaatttgccatagcatgccatcggtatgggcaatcacggcaacaggtgagaagggttgagcggcagtgagattagtcacttgcacggtaaattgatggctttctgccatttctcccatttggttagtcatctcatccacactgtctgtcatatcaacagtctttttatcagagccaccgcaagctgtgaggcttcctgcgagtgcaatgatgagtaagctttttgaaaagcgcataataacctcctatttcactgtgatagttaacatagcaacagggttaagccatctgtgaacggtattattaaggtcactcattccaccttcaggatcatcgtcacctaagttcccagggtgaatatgaaccatcatattgctttcgctactagttacaccgcttgcattcataccggcattaccgcccggcgcagccggaataccaggcattcccatagcaccagagccatcgacaactcgttcgtcatttgcttcggtgcctgcatcataagcgtttaaatacagggtgtaagtccctgcttctgatgggatcatccaactgtctaaaccaacaaagccatcattggtaggcagtaacatagctgttaacgacaagtagttgttaccttcactggtggtaagcgaagccattgtagagctggttggcgctaataagccttcggctgggttggcaaccatatcgttatttgctgcagctgcttcattcattaatggttctatgttaccgccttcagccatcgcttgaagagccatagaagcaggtgtagctacgttaaacatctggctatcgttagtgtgagcagtaattaagataggagtaaagtgtaagccttgcgtaaggttagttagttttatatcaagctcagcagcttggcttgtaaggctagtgactgcacatgcagcaaacaaagttaaaggtaaagctttcatgatcgattcctgtttttgatgattcagaatcagtatcgaacagcaatatccaaaaactttcacaaagttatcacatttttatcacagccaaaaaaatcttctcaaaagccttttgtttgtcttttgtgcacgtttttgttttaaatctaagcaaattatctatggtaaagtagcctaaaggtttatagtagaaacataaacagaccataacaaggaatttaaaatggatgataatcaaaaagttgaaataattgtggccgataaagagcagcgtaattgggcgatgttttgtcatttaagtgcattagcgggattacttttcccatttggctcggttattggtccgcttattatttggctggtgaaaaaggaagaaatgccgcttgttgctgagcatggccgcaagtcattgaactttcaactcaccatgatgattgcttacattgttagcttcttactggtgtttgttgttgttggtgtcattttattaccaatcgttgcactgttttctttgattatggttattgtctcggcaattaaagccagtgatgggaaggaagttaattacccattgacgattgaatttataaaataaactgattgccatataatgagggctcagccctttgctgagcttattttgtggtatttatggcctatttctccttattcctcagcgcgtttatttccgcaaccttattaccgagctcctctgagttagttatgaccgccatgattgccagtggcgattatctactttggttgttatggctaagtgcaaccgtgggtaatgtgcttgggagttgtgtgaattattggctgggcacgcaagtcatgcgatttaaagaccgtaaatggtttcctgtatcgcaaaagtcgatagataaagcagaacagcaatttaataagtatggtatctacagcttgctatttgcttggctgcctattgtcggcgaccctttaacggttgttggcggaatttttagggttaagttttcaatctttttgttactcgtgaccctaggcaaaggcgcacgttatttagctgtgcttgcctttgcggtaggactagaaaagttattttaacttttttgccaatcaagagtcagtgatactgaatcagcaaagcgcagcgcatgcggtttatcgacacgcactttggcatagtgaacactttgatgctggtggcaaatcgctaaaatttcagcaaccaatttttctaacagtaaaaagtggccttcttcgacaaggctgatcacttctttagtaatagtcttgtagtttagcgctttatcgactgcgtcagtctcacaagcttgatcagcagggtagtgaatttctaaattaatcactacatcttgctttttctcgcgttcctcagggttaaaaccaatgaaggttcgtagcctgaggttagtgacattaataattgcgttagccatcattaccctctaactagttgtaagaactcgttacgggtttttggatctgctctgaagttgcctagcatgaccgatgtacgcatgcttgagttttgcttttcaacgccgcgcatcatcatacacatatgttttgcttcaacaattacacccacgccttttgctccggttacttcttcaaccgctttagcgatttgatgggttaattgctcttgaatttgaaaacggcgtgcgtacatgtcaacaatacgcgcaaatttagataaaccaagaactttgccatttgggatataggcaatatgacagcgaccaacgaatggcagcaaatgatgctcacacatagagtaaagttcaatatcttgaaccagtaccatgtcatcggcgtctgatgtaaataccgcattgttagtgatctcgtctaacgtttggcgataaccttttgtcagatactccattgctttagcggcgcgcttaggcgtgtcgagtaacccttctcgttgtggatcttcacccacggcgctaataatttcgtggtaactcttttttaaatcatcgtgcataggattctcagtaattcgttattttaaatgtctgccaccatcgacaggcatcgaacgcccggtaatgtaatggctgtgtagtaatagctctacgctgtgaataatttcagcgcaaccaggctcaatgcccatcagtgatttttgtaatgtttttgctttgtattcgtcgctatcatcttcattgaaaatgattaatgacggcgcaattgcattgacctttattgcaggggcaaacttagccgcgaatgattttgttaagttatcaagtgcagctttgcttgcagcataagcaaggtgttttggactacctttttcaacgacataatcggtgagatgaataatatcggcagggtgtcctgtattttcgtaatggtgtagcagtaaatcgctcactgctaaatttattaggtagggcgcttttgcatgaattcgcatcatattatcgaaaagcgctgcataatcatggttacttgcttcgcagtcccaactagaagcgttatgaataatggcttgaagttgattggtatgcgattttaattgttctatgaagttggctatcgcttcatcactattaaagtcagcatgaatacatgtagccccttgtccagctagtacatcaatggcttgatgacgcgtacggtaggtaacaatgatttcttgcccttgcgctaaaaagtgctcggccaaagcgagtccaattcgttggcctgcgccagtaattaatatgggcgatgacataaactaatataaaaccttagatttttaatgtaatgagtaatgtgtttaacactatcaactataaaccaaattacagaactatttcatctttactgcaatgatgttgctaaactttctacgcaaatgaagataacccagatcatttttagtaatggagttattgtagttagcttggttttgataagaaaagcatgtcttaagcaaacccaaaaaatcattatctcgcagcttttaacgccgggctaaaggaagttttaggtatcagggaagagttagctgtaggcaattaaacagtgttaattgcctacagctagaaaataatgcagcaaataatattgttgcttacagcgcgtcgtaaacggttggaatagcttgacgtttatgttgagtgcgaagataaatcgcagttagcttctcttcaacttctgctgagacttctttgccttctaagaaatcgtcaatttgatcataagttaggccgagcgcttcttcatcggttaagcctgggcggtcacattctaaatcagcggtaggagctttatgcactagcactgctggtgcgcctaaatgctctgctagagcacgaacttggcgcttagataaaccaaatagaggagcaagatcacatgcaccatcaccaaattttgtgtaaaagccggtaatattttcagcgctatggtcggtgccaacaactaatccttggcagaagcctgcaatttcatattgtgcgaccatgcgctggcgtgctttaacattacccttaatgaaatctattttagcttgttcaggaagctcagcacttgcaccgactaccgcggccatagcttgttcatgcataccatctacagctgctttgatattaaccgtcatgcgctttgatggcttgataaagtcaaccgcaagttgtgcttcgtcttcatctgcttgtacaccgtaaggtaaacgtacagcaatgaactgataatcgttggtgttatgttcttggtttaattcatctacagctaattgacataaacgaccacaggttgatgaatcaacaccgccactgatccctaatacaagcgagcgtgagtgcgcagcaatgagacggctttttagaaagttgacgcgacgagtgatttccgcttttacatcaatagtgggttggactttcatttctgccagaatgtcggcacgcatggtagagctccttttttacttttggttgtcagcgtggaagccccaagacgaatggggtaactacattatgttacgggtcaggttattattaaagacctaaatgcgcttttatttcgttaatttgttgcttaagttcgtctatttcagctcttaattgttgaacttcgctactgttaattgcttcaggctcactcagcatctcttcgatactatctggatcaacgaataagtgcatataacgactttctcgttttcctggctcacgggctaagcgagtgacatattctttctcgattaatgcagctaaagctgcttccacttcattaacattactaaactcagcaaggcggttacttcgggttctaagctcgccgggggtttgtggtccgcgtaatagtagcaaacagataatagcacgctgttgttcggtaaattgcaagctgccaaactcggtattgcaaaagcggtgcgcgtacttattaacccgcccagaaaggccttcatctaaggttactaatcgctgcgcaatgagttcatcaagggtatcttgtacttgtgattcagataacgacagtactggatctcgattagatttttggttgcaagcgttggtaagtgaatttaaagataatggataatgttcaggtgttgtactttgtttttcgagcaaacagccaatgacgcgttgttgatttattgataattgcattgttttactctctattcttcagtgcttaaccacacggttagttttttactgagcgtatcaaacttcaaaggtttggtaacataatcattcatgcccgcatttaaacagcgttctttgtcaccttgcattgcattagcggtgagcgcaatgatagttacatcttgatgtgccttaccagcttcacctgcacgaattgcccgagttgcttggtagccatccatttctggcatttggcaatccataagcacgagttggtaaggcatttgctcgcgacgagatagcttagcaattgcttcaaggccattttcagctatgtcgaagctgatacctacctgctttaaaagcgatccagcaacaatttgattaaccttattatcttcaactagcagcacttgtgaagcagaattttcatcttgagtggcaacttttgtaatcagtgtgtcgttgtttatttgttgttgctcaatgtatttttcgttagcaagtgagttaaataaatctgactgggtcaaaggtttaaaaatgatactctcagcttttaaggcctgtttgctttgcacttcggtcaaactcattggtgccattaaaatacgtttacactgttcggcattaaagtgtttaacaaaaacttgttgttgctctttagttgcgttggtataaaacaagaaatcaacgaaaatcgcgtcacattcgacatgttccgccatagccgcgcgacccaataaacgtgtcatatcggtaaatacttcaacgctggcaccccatagttgcagctgttttttcgctatattgctactcaatttacaattatctgcaataaatatatgttttttatcaataatatggctgggttctagggctttctttttatgatctatttttacttttacagagaaattaaaagtactgccttctccatatgagctgactacactcacatcgcccttcattaggttacatagttgcttaacaatcgctaagccaagccctgtaccgccatattggcgagttgttgaggtatctgcttgggtaaatgagtcaaataatgtagcttgcttttcaggcttaataccgactccggtatcaatgatggaacagtttaaaaagtgctcgtcatctaatttctcaagcttagcaataataattattttgccatttttagtgaatttaaccgcattactaacgaggttgttgataatttgtctgatcctgtttggatcactgacaataaattcgtgataaatatcagtcgtatcaaggataagtttggtgttgttttgttcggctttaattgcaaatgattcgatggtgttgccgaacagttttgaaatattaaagctaacattttcgatatctagtttaccggcttcaatttttgagaaatctaagatgtcgttaatgatatgcaatagcgactcggctgaagattgtgctagctctagatgatgactctgttggctatctaatttagattgcttaatgatattgagcatgccaatcaccccattcattggagtgcgtatttcatggctcatacttgctaagaactcactttttgcttttactgcttgttcagctgcttctttagcttgcactagttgctgctcggtttctatacggcgttggctggcgtgtaaactaccaattagcgctgcaacagcaattaaaaaactttcttcgtttttgctccattgcctgcgagatttgcatttttctgcgcacacaacccccatggttttactaccggtgggaatgatcaccgtgagcattgagcatattttaaatcgttcaaaataagttgttcgtaattcttttaaaaacggatggtgtggggcatcactagcatttacaacggcattgttattaatggcgtcaaagtaatcagggtaatcaatttgttttagtgtggttgcttctcgtatttgtggtgtattctcgtcatgaacagcaaaggtatcgagagactctctgtcgtcactaaataaccaaatgctggcacggtcaacgtcaaaagcatgacaaatcgcttgtacaatgacatgctttgataaattcaaattacccgttagtacagcatcattaactgtgagcgacgctaaaatctcgttgtgtaaagctactttcctgttttcaatttcaactcgtttacgggcatcaatattttgcagtgagccgaatacttttatgcagcggccattacgatgttcggtttcggcgtgaactaacacccatatttcatccccatcagctgtgacgacttgtacctgagtttcaaagctttcgccgttttttatagcgcgctcattcaattggcggattttatcgcggctttcaccggctttaaaataactataattttgaggccactcgggctgcttgctcagcggaaatttaaaaatttgtttggtcatatcagaccaatacacagattttgtttctaggttgaacgaccatgcccctactttggcaagactactcatagtctctagcattcgctcactcttatattgccgctcaagcattttcagaaaaaaccatgagcaacctgcaaataaaacacaaaataaaataatggctaaccgtagtggccaaatggcagaagcaggggggtgccaacctgctttgggtgatgcgtacatttgccacttaccacctgggaagtgaattataaaatcgagaggatcattttttaaaattgcactttttccgtaaaagaaatctccttgtgagcccagaccatttcgcccttgcagggcaacatcataattttcactgagcgaaactaaaccagagtttacatatattttattgatatcaagtaccacagataataatccccaaaactgttgttctggaggaataaatacaggcatacgtgcgatgagtgcctgcccaccttgtactagctctaatgggccagccataacaatctggttttcatctcgtgctctgagcgcatctgcgcgttgtgctgcattttctaaaaaattaagcccaattgatttttcgttaccttcaagaggataggtcattcgaataaccatattgggagccgcaccaatatttcttagttcagatgaggtttcaaatagtggagaggctatttggctgtaacgagcttgatctaaatttggctccgccgttatagctacggcgagaccgcgaacaagttgaatatttgagacgaggatcgcttctaattcagcccgataagcacttacttttgctagctcttgcgcacggaaagcatctttttcacggtgataatttatccgatcaatcacgatacctataacgataacaagcacgagagatagccaaaaagctaactttaatttatgtaatttcttattatcagtgtcgatcgttaatggcattagaagcattgatttttttactatttaattactatagacaatttaccttgtaattaacaatgggggctttgatatgtaagttatttgtctgtgggtcgttttctcagtttagtgatcattattttgtatgaagacactattttttcacagaacttaggttaatatagtgttactttagctaagggaagcaagcatgtttaagataatcaaatggttactagtcgcttcgctcatcatcgcactattggcaacaggcctcatctatggggtgttgaatctaagtttgccagcacttgatggtcgaggacaaagtaatgcaattacccactcagtgaagattgagcgtgatgctttggggcaagctgttattagcgctcaaaatcgcttagatgctgcttatgcgctcggttttgcgcatggccaagaccgattttttcaaatggatttattgcgccgtaatgcggcgggtgaattaagtgagctgtttggtaaagctgcgttagagcttgataaaaaaatgcgttttcatcaattacgtcagcgtagccagtttttagttgagcaactacctgctgcagataagacgctacttaaagcctatgctaatggcgtgaacgaaggttatgcgcaattgggttttgatagctttgaatacatattaacaggctcgagtgctcaaccttggcaaagcgaagacagtttgttggttatttttagtatgtacttagacttacaaacagcaacatttgaacgagataaaacgctgatagaaattgagcagctttacggtaaagacatggttgactttattacccagccaagcccttatcaggctgcacttgataatagtcagttacctgcatacggtgcagggatccctgctttaaacaagtcatcatgggtaatcaacgatattctcgaccgaaaagaattagggagtaataattgggccgttacagggaagttaacaaaaacgggcgctgcaatgttatctgatgatatgcacctttcttttgcggtgccaatcatttggtatcgcgctcaactcaattatcctgttgatggtcagatgcagcaaattaccggtgtatcattgccgggggcaccggcaattgtggttggtacaaataataaaatcgcgtggggttttaccaatggttatttagataccgccgattgggtagcacttgagagtaaagagaaaacgtggcaaatagatgaacccattttacttaatgatggcaaggttgaaaattatgctttgaccatgagtgagtatggtcccgttaaagaaattaatggcaaaccctatgctttaagttgggttgctcaccatgattatgccgttgatatggacttattaaagcttgaaagtgcaaaaacggttgatgatgcgctagctattgcagcagacgttggtattccggtacaaaacttaatggtagtcgatgataaaggcaatgctgcatggaaaaatatgggggcagtgcctgcacgtaaagtgcctcatcaactggctgtgtctgaacaagcttactctgcagcttggcatgagaatgaagcggatcgtccctttgtaaaaaatcctgagagcggtcgtttatggactggtaattctcgggttgtttcggctaaagacgatgagcgatttggtaatggtgcatacgcgatgggggcaagatcagcacaaattcgcgatcgtttatttgaaaagcagcaatttaccgagcaagatttttattcattacagcatgataacgaggcgcgctttttagcaccatggcatcaattactggttaaacagcttagcactgcaggcgataaatatgcgctgtatttaaaagagctaaataactggcaggcgtgtgcttgtagtgactcaattggttataccttagtaaaacgttaccgcagtgaagtaattaatagcttatttagtccattagaaaataagctaaaagatctcgacagtagtttaaagccagttaagcgagatttagagcctgccgtttggcaacttatcgaagctcagcctcaaacatggttaaactctgattatgcaaactggcaacagcaaatggtaggagcctttgaccgcgtaattactaaacttacagagcagtacggtaataatccacacagttggcaatggggtaaggtcaacgaattagtcattgagcacccgtttgccaagcaaataccggcacttaaaagcttattaaatatgcctacagctcctggctttggcgataccttcatgccagcagtccaaggtcgtagctttggcgcttcacagcgttttatagtacaaccaggccatttagataaagcgattatggcgatacctggcggtcaatcagggcatccgttgtcggagttttatcgagctggatttgacgactatgtgagtaacggtttaactcctctgttaccacaagagattattcatagtattcgtattgatgcggttaactaaccgcatcaatatcatcgaaagtagggttggaacctttcgcgacagtggtttgatttcgacccaagtgtttactttgatacaaggccgtatcagcgtgttgtagcattttttctatcggtgcaagaggctgccactcgattaaaccaaagctcatagtgattgttaaatcagggaaatcgggatgggcatcaagctcggctatctgttgacgaagcgcttctattttagcaaaagcttgctgctcattagtatttgtaagtatcaataaaaactcttcacctccccaacgaacagcaatgtcatcttcactgataaagtcactaattagttttgatacatttattaagatggtgtcacctttatcatgaccaaaggtatcattaatacttttgaacctgtcaatgtcagccataaccatacatagattggcatcttgctcgatactctttttatgtgccattgagatgagctttttcgcaaaccgtcggttgtataattttgttaatggatctcgagcggccatctcggtgagctcaacgcgttgtgaaagcgtaatttcacgaataagccccatcccatacaccataggtaatccggcaatgatgatgtttatcacattgatatatggaaggagttcaggataagcgaaaccataggttacgtctgagaaaaataaatacaacgaagcaaaggtagcaatcattaacaagctgtatgttgcagcccatttaaaagtaagctggtaatcaatcatcaaaatacacgacacagtccataaatagaactgaaacccagcacctaagccaagagttgcgcagacaataactgcatgaataagcacttcgaggcaaaacaccctcaaagcaagagaggttaagccttgctttataaggaaaataccactgccccaagcaaatacacttaaaatgttaactatagcgagcatgttcgcgccaatgtgcgcgaaagcggggattagtaaagcatgtacagctaatgcgaaataggcaattttagtaataataagaaactttacatgctctatttcttctaatccagactgtttggtttgtcttagtaaatgttttatcaaaccaacctcatacacacttacagggagaaattaaagtatagatgattatttgaacaatgcggcagtgttgtcaggtgcttttaatatcagcacaataaaatttttgtataatgctaattaaagccttgttcacctgcagtttgctaagtttaaggcttggcagagctcataattgatgccactctaaataaaaccaatctagaaacatgagaatatcttgttttattgattatcctctcgtgcctaaaaggagtaagtatgccggcggaaaaaacgcatttagcgatctgtaatttaactaaagagcagtatccacaaatcaaaactctcatggatcaagcgtatccggggctcggtggtgcttggccaagtcacactatttttaggttaatagaccagtttccggaagggcaaataggcattgttgatgacggtgttttggtcggaattgcgcttagcgtacaggttgattacggacgcttttctaaccctcatacttatgaagacattgttgatggtcacgaccgtgtatttagtgaccctgaaggtgatgccttatatggtttagatgtggtcatttcatcgactcaccgaggtatgcgacttggtcgtcgtttatacgatgcgcgaaaagagttgtgccgccagtataacttacgggccattttagcaggtgggcgaattccgcgttattacaatcatagtgcagagatgactccgatggagtacatcgaaaaagttgaccacaaagagctgtacgatccgattttaagctttcagctatctaatgatttccaagtaaaacgtctacttaaaaagtatcttcctgaagatcaggaatctgttggttatgccactttactagagtggaataacattatgtttgagccgactgatacggtacttgagtcgaccaaatcaattgtgcgcgtcggtgctgtacagtggcaaatgcgctgtgttgagtctgttgaagagctgcttaagcaagtggaatattttgttgatacggtatcagattataagagtgactttattctgtttccggagtttttcaatgcaccgttaatgggactcactgagcaaagcaatcaaaccgaagcaattcgctatctggccgaatacacagaaacattccgtgatgctatgtcgcgtatggcggttgaatataacgccaatattatcaccggttctatgccgcttgctgaagacgacaagatttataatgtcagctatttgtgccaccgtagcggtaaaattgatgagcagcgcaaaattcatattacgccccatgagcaaaatgactgggtgatccaaggcggtgacaaaattgccgtatttgaaacggatgcgggtcgtgttggtattcaaatttgttacgatgttgagttccctgagttgtcacgtattctcgctaaacaagggctggatattttgtttgtaccattttggacagataccaaaaacagttacttacgtgttcgtcattgtgcccaagcacgcgcaatcgaaaatgaatgttatgttgtgattgcaggctctgttggtaacttacctgaagtagagagtttagacgtacaatactcgcaatcggcagtgcttacgccatcagatttctcattcccgcatgatgcgaccttgaatgaagcaacaccgaatactgaaatgttgttattcagtgatttagatatggataaactgaaaatccttcacagtgaaggtacggtaagaaacttaaaggaccgccgtgaagatctgtatgacgtgatcttgaaaaagcgagagcaataatggcgtggctgtatttaattgtcgcaggactgttagagattggttggccagtcggccttaaaatgtctcaacagccagatagtcgctggttaggtattgcaatagctgtcgcctttatggtcgccagtgggtttatgttgtggttggcgcaaaaggatattccgatggggacatcctatgcggtatggacaggcataggagccgcaggcaccttcttggttggtattttattatatggtgatgctgccacatttggccgcattgccggagtacttttgataattagtggtgtaataaccctaaaaattagtcattaaaaaagcggcatagccgcttttttaatgactaggaataagcctaattgggtagtattaccagaatagctgccaatgcaattaacacaagccccgccgtgtcttggcgttttaacggctgttttagccaaagaatcgataccataatggtaaaaaatacttcaatttgccccagtgtttttacataagcaacatgctgcaagctcatggcgctaaaccaaccgatggaacctaaacagctacacacactaacagcggtcgtggtgcctttgtgatgccacattttgttaaatgtatcgcgctctttgagggcaatataaacgcacagcatcaacgtttgtaagctgataatcagtaccaatacccaagccgccgagtgtgggaaagtcagccctgaatttaagcttgcttcgcggatccacgacgatgaaagagcaaatgaagtaccgcaagcaagcccaagaagtgcagtgcctaaattaaagtgtttaacattcgcgatgccacttaatagcaataccgcaattgcaccaataaataccccaatccagcctagtaatgatagtgcggagccaaaaaacataacacctaaaatagcagccatcagcgcttcacttttggcaagcccagcaccgactgcaaagttattcattttaaatagttttaccatcaagcctgtggcaacgatttggacgatactggcgccaacaatgtagccaataaaagccagattaaagtcaggaagtgcagcgtcttggtattgataaagtgcaaataaataaagggcagcaatcgggctggcaacaataaagcgggcaagcgtcacccctgcaacactcactgttgcactgagtttactttgcagagcattgcgccatgactgcataaacgctgcaaaaatagttaagaaaatccaagtcatattgaaaatatattaatggggggaggcaattagagtatcaaaaccaaagtattagggcattagcttatcgaccaacttgagaaaaactcagctgtgacaatatgtcgcagggcttttaagtaatcattaggctatagtgacaatgatgctattgctagccgttgcttttagaagtagcggcttttttttgtttgctgtaggttaagctattacagttaaaaataaggaaatatcatgacaacactgattatctgcgcactcatcgcagtactcataccttatttagctaaagcccccgtggcttttgcacaaaataagctagcaggctacgacaataagcaccctcgcgaacaacaagcaaaactaaccggctttggtgctcgtgcattagcagcacatcaaaatagctttgaatcgctgattatttttgcagtagcgctggcggtggtaatcggtagtaataatatctatcaggtgactgaaacccttgcgattgtgcatgttattgctcgcgttctgtactgtattttctactacataaaccaagatatattgcgatcattagtctggtttattggttatgtttgcgctgtggcgatgatcgctctttgcctctagttacaaagcaatgagttaaaaaccacaaagcaagcggcttaaataaggcgcttgctttagggtcttaagttgctacagcttatttagaactgactttaactttctcaattaaatccttagcttgatagttttcgtctaaggcaaaatcaagttgcactagggcgtttttaaagccagattcagatggcgcatattgccattgttttaatgctcttttcgcttctcgattgaaaacatcttcaggctctgcacttaccacactaatattgctggtggcgccgcttggtaaaatatcgtatttcaaaacgactgaaccgctaatgccttgctccgcagcttgaattgggtatatcggttctacgcgcataaccgcttgatagtcttttgtcttttcaactgacattggctgttttgcaatggcaaagctgctaagcatgcccgctgtaaaaataactaatgctgtttttgcgataaatgagctgttgtcgatctgctttatttgatttagacgttgtaacatggtgtttttatctccgtattgtgaataagccattaagcctgttctgctaaagcttgcacagtgcactaatgccttactgtataaaattcgttgctctgtcgatttatttttgagtacctgctcatcacatgaaagctcttgaatacggcgcaggcttgcatagccaagccaagcgattgggttaaaccactgcacaatagtggcactcaaagcaatggcattaatcagattgtctttacgtttaatgtgcacagattcatgctctaaaataagcgctaaagcatggttatcgtagtggctttggtagtttgtaggcagcactagcttggtatttataacgcctacaaccataggggagctcacctgtttgctttggtataagcgcatactttggctgttgtgatgatcaaccgtaattggctctagttgcagtttcgctaaaaaacgataatgaaagtacacggcagtgatcagcatagtagccgtaataaagccataaatagcgaaccacgttagcgtaaattgcggcattattgctgtgtttggcgtaatggtaagcttactgataaagtcgttttgtatcggctttaagtgatttggcaggttcgctaaaagtaagctaataggtagtagtgcccacagcgtataaaccaagcgcgctgataactggctcaataattttcgctctagcagcaataaaaacaaaattgcagatgagatcaaaagctgttgttctaacagccaattaaaaaatgcatctaacataacaacgccttacttttgctgtttttcccaatcatcaatgaccttttttagctcatcaatatcatgttgcgagagttgctctgatttagcaaagccactcaccagcggcgcaattcggccattaaaaaagcgttcaataaagctttggctttcttttaatgtgtattcttcacgagcaatgcaaggggtgtagttatattggcgaccttgtttctcgaagcttagtgcgccttttttaactaaacggcttagtagcgttttaatggttttttcgtgccattctttatcgtcacttaaacgcgcaattacttcactagccgtggcagggtagccaagccataccgcatctaatacttcgaattcagctttagaaagttcaatcatttttatgcctacaggtgtaatctttaattaaagattacacgcgtaatcaattaatgcaaacttttttgttagagaatgtcactttttttgatactgactatctgtccttcgggcaaatttaacgtggttagtgatagctgtgcgatatcagtgcggaaaagatcgatgactttatagccacaaaaacgtgccattttacgtatttgccggtttaaaccttgttttaatacgatgcaaaactgcgtttcgttgacttgggtcacttcacaagggagggttatttgtttatctactggcacaccgtttgccattttttgacaaaaatcactatcgagaggtttatctacggtgactaaatagcgtttgggttgatggtaatcagggtggatcagttgattacaaaattcaccgtcattggtcaaaattaacaacccacgagagtccttgtcgagccggccaattggataaacccgagtggttttaggcaggctatggataaggcttgctgggtctgcagcatttaatttgcaatctataccaacaggcttgtgatacgcaaagtaggtgagtggtgctttagttgaaattttttcgccaagtacaattacatcatcttgttcatcaacatgatctatatgatttgcagcacgaccatttactgttacctcaccttggtcaatcaagcgcgatgcttgctttcgtgagcagacacctgcatgggcaataaatttggcgagtcgcactttttcagtcatggatgctttttgtacaattaatttgatcacagtataccaaaatcacgtataaatagttccaccaccaaagaggaacgcacatgcctatcaagttatcagagcttgcagatcatcagccactgcaaaaagttatccttcattcgttggaaatggcgctgtatcaagtgtctgtggtaattaataacgttgagtattatgttactgatgagaaaggtgaatttatacgagatctcagtccgttgcatattcaaaagcgcctagatcatttaagttacggtgatatggttttacgccacaccagtgcttatgacgaaatgtgcggtcagccagaaaaattggccagcaatatgctagaagtaccctatggtaagaatcacttatactgattaacgatataagcgtatactgagtcataacattttatatacccaaaccacctcaagatgcgagtttcagttggaattaaatgcgatttaggcaaggcattgattgcaagtaatagtggttctattgttaaaatcaataacgcagtataaattgcatttaaaccaaccctttgggcgcttcacaggcacttactctcatcgttgttacttcttaaaagggactgccattcttgcaaagtaacgccttgatattaagcacctgtgaaacgctgaattctgcatcttgaggtggcttgggtatatatactatgtatcaattaaaaagtgatgactcagctgacttaaataaccagctaagagaacatgttgttgcctacaatgcggcacattttaatgctaaacgtatccccgttggttttaagtttgttaataagcataacaccgttgtggcgggtattcatggccaagtatttggtaactggctgctaattaattggctttggtgtgatgataagacgcgtggtaaagggcttgcaacccgcttactaacggaattagagagcaaagctaaagcgcttggcgcaaacactgcacaactcgatacactcgatttccaagccaaacccttttacgaaaaaaacggctaccaagttaaatatgaaatgagtaattacccactcgatggttgccgttattttatggaaaaatctttgtttacttagctttcagtacttcttgctcggtaaaagtaactcctaaaaaaggagttgcttcaggagcaagcataaaggtgcgaatgttcatgtggtcttgcccttcaggattcttcagtacatcatcacgataaaacgcgccaaaacaatctagggtattttgtttgcttagttggttaagttttgcaaaggcgaaaattttacatgagccattattttcatttgctgcactgatcaatccatgattgttaaagccactaggagtgaaatggtagttactctctatcacagccattgtatccttaaactctatctgctgtggcgtgttagctaatttcgataagaaatcgttaagtgtcattacctgtccttaatagttatcttttatcaactctaactcattcacttgttgattgatattaaacttaaaattctctaagaagttcatacctagcaaaccataactgccatgacttttaagtactagaacatcgaagttatagagccgctgttgaccgatttgaaaagagtgtacttgataatgctgcgcttcaacgagtccatttgcggtatttacttgcatagtaccaagataatgggcgggttcttttagttgttctagcagtgattgcgtcaataccgtaaagcttgcgccagtgtctatcattagcttagcgtcggtgtcgtcattgattatgctattaactaaataatgtgagccatgtgggatgagaggcacaacctcaacccctgctaatgcttgctgtatcaaacgatataattcgtcagcttcttgcttatgctcatggttttcaggaagttgctcaagcgcaatttggcttgcgactaagtcacctaggtgaaaataagcctgcgcttgaactaataaataaaaggtgttttgcggcatataatctagccattgttggctgtgattgagaagttcttgccagttttgttcttcaatcaatgactctgctcttaactttgttagctccgaaattctcttcgcgaatcgcgcttgcttacttttcccaagctgattatgtaaagccattaaactaataattccctgttgaacatggccctgattgatcattcgttttgcatcgagttctaacattgatgcatcataagggtgactattcaaaaaggcagttaaaaattgctcgctaagttcgtcatcatggtgggatagccaagactcaagttgctgttgccaagcacgctttaattgcagtgcaaagcttgggttattttctaaaagttgcgtgtactcaaggactgcttcatcaaatagattattgcgaaataaggcgactgcatgttgaaacttctctggcaacctcgttactttgctgggctttataacagtgtttttttcggttagcttctcagctgatcgtttataattatcatattgccataggaaatagccattaaggctaagagagcacacgagtagtaactttagtagataattcacttgtgccttcgccttacttaactaattaattttccatacgagaagtgtaggcatatttaaatttaacactgccatgtatcttccatactttattaagcataaaacaaattacaaaaattggttactttttaactaaatgattcaataaaaagatatcgttaatttcgatgtcagctaatcccttgtatttgtaatttgctgcctgattattcaaccaaacactttgacagccagcgttatttgcaccttgaacatctgtgtcgagactatcgccaatatgcaaaatctctttgtgagctacatttagcgtttcagctgcaatgtcgaataagccgggatggggctttgctttaccatgagggcctgcctgtaagacaagttcgaatacccctttgaggttaaacttgtcgacttcgacattgccattggttattgctattaagcgaaattgtttgctgagagcttttaatagccctaacacttcttttgatacagtaatttggctgcgagcatcagcaaatgcttgataggcgttgttagcatgttgttgtgctaaatcatttttaaaccccagatcgtgcatggcatagagtagtgccgcacgtcgccagcgagtcacatcgtcaatgaggcttggatctagcgctaaggctttgtcgcgacaataaagccaatactgcgtgtcattggttggccattctggcagctttgctaaataatcagcttgcgcttgtaaagctgattttataatcggatggttgttataaagtgtgtcatctaaatcaaaacttaaaacagtaacaggtgataaagcacggttaaaacggatcataattactaagtattactctggagttgagcgctttttagcgcgtggatgagtgttatcataaactttggctagatgctgaaaatcaaggtgtgtatacacttgtgttgccgataaactgctgtgccctaatagttcctgaacggcacgtagatcaccagacgattctaaaatatgcgaagcaaatgagtggcgaagtttatgtggatgaacttgcgagctgatcccttgttttattccccactcttgcatacggaggcgaacttgacgaactgaaatgcgttttttttggctgcttaaaaaaatagccgtttcatctgggtgtgcaaattgtggacgaatttttaaccaagattttaaagcgtttaatgctttgctacctacaggcaataaacgctctttattgcctttaccacgcactaaaatttcaccttcagtggtgtttatatcttgtatgttagcgccaactaactcgctaatccttaaccctgatgaatacatcaattccatcatggctttgtcacgtattgttagtggttcttcaccttctagttctaatagctttgccatttgatcaacgtctaaatttttaggcaatggcttggaaaactttggcccttttatagcctcagctgggttatggtagtgaacgtgattttcaatctttttagttttaagaaacttgtagaggctacgaatgcaactaagctttaagctaattgtgcggccactcagttgtttgcctcgtagttgcatactgtaacggcgaatatgctcaccttgaacagcaaaccagttttcacagagtttactaaagtataatgctgcaaagcctaattgacttgtgtattggttgactgtgtgtgctgagtattgcttttcgtagcgtaaataatctgcaaaaagttggataggtgtgcgccaagcatcacttaattcatcaatatttggcgtcgtcacatcgctcatgcaagttccaataaccgcagttgcaatgagcgaacaaactcaagtacgaaaaagctatctttagcgggctcaaagtggtttacatcatgactaccaaacgccaatatggcgacaggatgtgcggtgtttccgatcaggtaaagggcagttgactgtattgaaccagaaaatagtaaatcgcattcttgttggttgatacgacctaaataaatgccatcgttttgtagtcgatgagttattaaatcatcaaacttcttttcatatttcactaagtgacattcattaattagtgggttggtacatataatgttacgcagattgatggcgagcgttttaaagtcgtaattagtccatagttggcgatgacattcgctgaacaggcggtagattaattcgttttcttttgcttgctcaagaagttgatcaatcttatttttcaaaaatgtattatgttcacggagctggcgctgttgaatatgaaccagtgaggttgctccagcagcttgttgatgcagttcaatgtcagcgagtaactctggctgtttaatgaaaaaatcagggttttcagttaggtattgtgcaatttgttgttctgttagtttgctcataatgccacttgtccatcaaaaacatgttcagcagggccagtcattcttactggatgtccttcaccttgccagcgaacttgcaagcttccaccgggtaaatctacttgcactgtgttggcaagcttattttgtacttgaccaataacgacagctgcacaggcacctgttccacatgctaaggtttcgcttacacctcgctcccagactctaagtttaatatgatcttgagaaattacctgcataaaaccaacattggctcgttgtggaaaacgctcgtgattttcaagcagtggccctaaagtgttcacttcggcggtatgaatatcatcgacttctaacacgcaatgtggattacccatagaaactgcaccactgaaaaccgtgtgctcttctgtgcggatgatataggtcaactcacgtttactggcttttaatggtattttgtttggttcaaagtttgggtggcccatgttgaccgtaacttggccatctttttcaatgtataaagtcaagttacctgatttagttgaaaccgaaattttatgcttgttagtgagacctttcatgcgcacaaaacgggcaaaacaacgagcaccgttgccacattgttctacttcgttaccgtcagcattgaaaattcggtaatgaaaatctaaatcgggagaataaggggcttcaaccatgagtagttggtcaaagcctatgccgaaatggcgatctgccagtttctttatttggtcacgagataagaaaacattttgagtgatgttatcaataacgacaaagtcattacctaggccgtgcatttttgagaaattaactaacataacgctctaattcaggattgctctgagctaatcatgccacagagctgcccggttataaaaacgtttatggtaaaattttctcgccttgccataggctttctaaggtttcacgttgacgaattaaatgactttgttggccatccaccataatttccgcaacacgagggcgcgagttatagtttgagctcatggtaaaaccatatgcgcctgcactgcgctgtgccaataagtcgcctgcttgaagtgctagttgacgatctttacctaagaagtctccggtttcacaaactgggcctacaatatcgtagttgtgagttggcgtatcatcttcacgaggttcaaccggcacaatattttgccaagcctgataaagagatgggcgaagcatatcgttcatacccgcatcaacaatagcaaaatacttgtcttggttttgcttaataaactcaactttggtgactaatatgccggcgttggcagcaattgcacggccaggctcaaaaattagttccaagtcttgataatcagctaagcgtgcggtgattttgtctacatattcacttgggtgaggtggagtttcaccgttataaggcacacccaatccgccaccaatatcaaggtgtgaaagtgttatgccaacggcttttaattcttcgataagagttagtactttttcaagtgcagctaaaaaaggtttaatttctgttagctgtgaaccaatgtggcaatcgacaccggtaatttttaaacccggtaatgatgccgcatgttggtaaactgtcactgcagtttgaatatcaataccaaatttattctcttttaaacctgttgagatataaggatgcgttttagcatcaatatcagggttaacacgaatcgaaataggtgccacaaggtttagtgacgtcgccacctctgaaatacgctcaagctctgcgacagattcaacgttaaaacacttgatccccaatttaagtgcatacgttatttcatcagcggtttttgcaacgccagaaaataccactttactggcatctccacctgcttcgataacgcgtgcaagctcacctttcgacacgatgtcaaagccagagccaagacgggctaaaatattgagcacggcaatatttgagttggcttttacggcataacataccaagcttttatgtgactttgctgcatcagcaaaggcacggtaatggcgctcaaatgttttacgcgaatagatataacacggtgtaccgtattgttctgccagctctttgacagcgatgtcttcagcgaacagctgattattattgtagttaaaaaagtccatctattggtcctgtttttgctctggttgttcggatggatcagcctgtggctgagattctttaggctgtgcagtatcatctggtagataaagagcaccactttgtccacatcctgctagggttagaagtatggcgctaagtggtaagattgtttttaatttttggctatgagtctctttcattagattaatacgattgctggctttataatcgcagagtaacagaatatttaaaaaatgcagctattcgcggatgaatttattcctgttacacttgttgtacacaatctgcccccagatctaggcttaaagccagttaaaggacattaaaatgactgatcatgaataccacacactagccgatgcattaatgctaactattgaagagcaaatcgatgaatgtgatgccgacttagattatgaatcagcgtcaggtattttagaaatcatcttcccagatcgcagtaaaatagtgatcaacaagcaagcaccacttcatcaagtgtgggttgcgacgaaatttaatggtcaccattttgaactacgcgatgataagtggattgataaccgctcgggtgctgagttttggcaatttatgtgtgatgcagcaacacgtcaagcgggccaacctattgagtggcgctcagagctatgagtttagagtttgtcgaatacccagcacagagtgaccacaaagcaactgttatttggttacatgggttaggtgattctggtgatggttttgcgccagttgcaccacagctagcacttccagctgagcttggggtgcgtttcgtatttccgcatgcacctgtgcaaccggtcaccattaatggtggtatggcaatgcgctcttggtacgatattaaatcgatggatttagataaacgtgctgatgaacaaggtgtgcgtgactcggctgcaaaagtggctgagcttattgaccaagaaattgcaaaagggattgctgcaaacaaaattattcttgcaggtttttcgcaaggaggggtggtatcgctacacttagcgccgcgactcgattataaattagcgggtgtaatggcactatcaacttacatgtgtgtaccagctaaattagccgatgaaaccaagcaacaagggttaaatatatttatggcacatggtcgatttgacgatgtggtaccgcatagtgctggcaggcaagcatttactgtacttagcgctaataacatggaagtaagctggcaagactatccgatggcgcatcaagtttgtggtgaagaacttatggctatccgtgagtggttaattgctcgcctgagttaatttttggttgtgaaggggccaaacatgacaaaaaaaattgtaataacagctaacatgaatgctgaaaaatcagaaagccgccgcctagaaacggtcacttatcagtggcactggcgacgcatatttatggttagcagtgtgatttttgtcgcactagcagctgttatctatagttttgttggtgctgttaatgccgaacaggctgaaaccgatgagcaaagtgctgaagcaacgggtactgttatgcaacaacctacagcagctgacactgtatcgccaagcgaacttgaaccagcttcacctcaactgcaagaacctgctattcaagtcgtcgagcaaaagcaggatgtagaagcgcctgctgatgagcagccaataacctctgacttagaaacagaaacgacagcgcaagcagaggctattgatgaagcttcgccggtccttgaagaagaaaaccgcgacgaacctatcgtcatcgctaaaaattctgatgttcaacagcaattttctcagtctgctcatattgctagcttagcgattggcgctaaaatagatacagataaagttagtagagcggtattaacaaccgatgttgttgatcgagaaccagtcaacgttctaaaaaacgatgtaaaattgtcggaaataacgcaaagcttaagcttttttagtgagcttaaaaatatgcagggacaaactgttcgtcatcaatggtattaccaaggcactcagcttgcatctattgaattagcaataactagcccgcgttttcgaacctactcaaccaaaaacatcatgccagagcaactcggcgaatggcgggtagaagtggtggacgcgcaaggtactttgcttgcgcaaaaagaatttagacttttagctgattaatttcggccagataaacaattggaattttcatgactcagacaacaaaacgcgttcgtatcgctacacgtaaaagtgcgcttgctctatggcaggccgaatttgtaaaagcacagctagagcactttcatgacgatgttacggttgaacttgttcctatgtcgacgcaaggggatattatcttagatacaccgctggctaaaattggtggtaaaggcttatttgtaaaagaattagaacaagccatgctagatggtcgagcagatattgctgtgcactcgatgaaagatgtgccggttgaatttcctgaaggcttagcgcttcatactatctgtgagcgtgaagaccctcgtgatgcattcgtatcaaataactacaaaagcttagacgagttaccgcaaggtgctattgttggtacatcgagcttacgccgccaatgtcaaattcgtgaagcacgtcctgatttagatattcgtgatttacgcggtaacgttaacactcgtttagctaagcttgatgatggtcaatatgatgcaattattcttgctgcagcaggtttaattcgtttagaaatgccagagcgtattacggcattcattgaacctgaggtttcattgcctgccaatggtcaaggtgccgtcggcattgaatgtcgtgtagatgatgaagtaacaaaagcgctgctagcaccacttgagcatacagaaacacgtattcgtgttaatgccgagcgtgccatgaaccgccgtttagaaggcggctgccaagtacctattggtgcttttgcgttggttgatggtgaacaagtgcatttacgtggtttagttggtgcaattgatggaagtcaaatgctacgtgatgaagtttctggccctgttagtgacgctgagcagctaggtattacacttgctgaaaagttacttgcgcaaggtgcagataagattttagcagaagtatatagagacgcttaacatgcatatattgataactcgtccagaagggaaaggcactgaacttgcgcttgcgcttcagcaggcgggttatcgagcaacccagtgtccagtgcttacccttgattatcttaccccaagtagtagtgagctctcaccacttgagaatgctgataagatcatttttatctcgcaggatgctgttcatgcattgttaaagctcacgcccacaattaataaagcagcacaactttatgctgttggacaacaaacggcagatgcagtgtatgaagcctttgggcgtcgagctgcagtgccgaaaaatcatgactcagagggcttgctcgagttaaaaactctacaagatgtagagttggataatattgttttggttaaaggtgaaggtgggcgcacaacgatagcgaaaaccttaaaacaacgtggggcacttttaaatcagctcgtggtatacaaacgaactgcaatcgagagtgaaccaggtaagtggatggaccactggcaaacaattgatgtagaaggtatagtcattaccagtaatgcagctgttgacgccatttttaatggtctcaatgaatcgcagttagcatggttaaaagcgcgacaattttatgttgccagcgaacgtatcgctgattatttaaaacaacaaaatgtagcaagaacgcagatacaaattgctgcaggggcaagcgatagtgctatgttcgcctgtattgataagcaaggtagcaaaatgagtgaagcagatttaaaacaaacgacaaagccagccagcgctgagcctgccaaaaaagcacctacagctaaaccagcagtagttcagcacaaaagagggataagtaaaacagggagcttggctttactcatttcactccttgttgcctcggctgtgggatatgagttttatcataaacttaatggcgatcaacaatctactcttgctattaatgagctgacaacagaaaaccaacgtttacagcaacagcttgatgcggtgaaaagtgcccagcaaacattgcagcaatcgctatttaatactgaacaaaaagttactgatgcgctaaatgaaagtgctgaacaaacgcagcagcagctgcaagcggctttaaagcgtgccgagcagcaaacttttacacttaatccgcaagaagtcacaagcttgcagcgtatggctgagtttaaactctgggctgagcacgactaccaaggtgctgctgctgtattatctcgtttagatagcttgcttgctgagcatcctggaacaggggctattcgccaagcaattcatcaagatttgcaaacattaaatgccattgagccagttgctgtagaagccatttatttaaagctgcacggaatcaatcagcaagtgactgagttggcatttaatgctatttctctacctgaagaagtaaaacaagaagatccaaatcagcttagtgaaaacgtcagtgagtggcgtcaaaaccttgcaaaatcttggcagcaatttaaagacttctttgtcacagttcgtactcgtgaagacatggttgttgcgccatttttaagtgaacaagagcgccatttagtaaaacaacgcctaagtttatatatcgcacaagcgcaagacgccgtattaacaaaacaaagcagtgtgtactttagtgcagttgatgcagcgcatgacttagtgaaagattactttaaacaagatgatgcagtcactaaagcggtattaactagcttaacttcactttcaaaagagcaactcgatttcagccctaaagtgtcactgcaaagtactgagcaggtgaaggagtgggcacaatgatccgcttcttattgataatcatcgctattgcagcttgcttaggaatagcccctttttttattgatcaaaaaggctatgtgcttattgcttttaacaataccacggttgagggcactatttggggcgtcactgcgttagttttgttggcttttgctgcgatattcttgctttataaattggtgcgttatttgtggtctttgtatagccatacgcgacatcgtttttttgctcgaagtgaagagcgcaaacatgctgcaattgaacaagggatatggagtttaatcaataacgattacgctgagcttgagttagcacttgaaaataatagtgtggcagagcaatggaatgatgtgcgttatgctttacttgccaaagcagcattggcaaataacaaccgtgaacaagcaattagttatcttgataaaatcagtcaagacaagcagctaaaagtcgctaacttatgggttgcaagtggtgagacgagtactatttttgctgaccttaaagccttggcagagcgtaaaaaagcctctagcttagaacttaaaatgtatgctcacgtcctgatgcaagagaaaaagtggtcggcgcttaatgaatttatgcctcgcttattacgtaaaaaagcactttcagataacgaatggcgtcagctatttgaccattatttttctgcgcaacctagcagtgagctaacaacacgttatgagcaattagccaagaacttaaagccgttagctgaagtgagctatttttcagctatggcgcgcgtgggtgatcttaataaaattgagctaagcttaatcaaaatgctaaaaaaaccacttcagcataaagatttagcacgtattttacgagctagcacggcgggtgatgcactcaaactgcaaacaagcttgcaagatatattaaaaaaagacaccgaaaatacagacctgcttttagccttagcatgtttagcaaatgctcatggccagtacgacttagctgcacgagtatttgataaagcgcttaatgcagataatcgcgacgagtatttgcagcaagcagtgctaagttatagtaaaagtgctcaaccagataaggctctggtactgtatcagtaattttggcttagcctgcacaggagcgatggcttgaaaaacttatttgcgctgacactaagtatcgctttcgcttattttctaacagggtatttaagtaattctcttttggctatcgacggctatgctgttgcagcatggcccccttctggtatagctctggctactatcttacttagtcgaaaccgcgccttgcctggggtgttgttgggggctttcttagtcaaccttatccatctcgataaagttactgatattttacattggcaagttatgttacaagccattggggtaacagcagcatctactttccaagcctggttggcttattacattattattcatgttgtaaaacgacctcttgaactatcgtcgctaaaacaaagtgtgcaagggttaatcattggcggcccactttgcagtcttatcgcagcatcgacaggtactgcgctgttggtcatcaataatgtgattcctagctacgcggcacttaataattttattgcttggtggattggtgacagtatcggagtactcatttttactccgttagttttagcggcatttagttataatcatgcacggcagcgactacaaattattgttccttcactattaatttatatgattatttgtgtcagcttttatggcgcagcaagtgttaaaaaggagaaagatttacagcgcaaagaagcaaaagtaagtgcaataaaaaccaatcttgaacacaaaattgatgaaattaagtctcatctgtcgttattggcaaccttttttgcaagtagtgacatagttgattttgcagagtttaagcgcttcacctcaagacagctgcaatacagtaaagagataatagcgtttgagtgggcaccaaaagtgattaattcacaattggataattaccaaaatttgctgcgcgaagagcttgggcctaattactatatcaaagagaaaaattccgcgggacaatggcaagcggtaagtcagcgtgctatttattttccggtgcaatatatccacccattgcaaggcaacgaggccgcacaaggttttgatttagcctcccatgaactgcgcaggcaggcactgacagacgctcgtttaataaaaaatgtcacagtgagtgagcctattaccttgatgcaaggtgatggtaacgataaaggagtcttgttctttaaccctgtttattcagacataaatcatcaagtcgggtttagaggttatgttgttgctgtggttaatttagagttgctggcgcaaacactaaactttaatcagaacacagagattgatgccagcttctatgacgttaccgacggcagtaaccctgtcgaaatttataaccctcaacgtgttggaacaacggccattgcgagctttaattttattattggtgagcgtgtctggcaggtgaaattatgggagtcagtcgcgcaatcgtcttggttgccttattggcttgcacaaatagtcggtatgctgtttgtttggttattgatcacctttttgatttcagtaaccggtactaatattcaaattcgtcagcaagtagcaaaacaaacccaaagccttcgtgaagaaaaacaaaaagcggataaagccagtcaaataaaaagtgaatttttggcgaatatgagccatgaaatacgcactcctattaatggtattaaggggttgcactacttggctatgcaagagcaagattggccgcaagcacgtagttatattgatcaagccgatggtgcattgaatgtactattaagagttattaatgatgttttagatttttctaaaatagaagctgggcgcttggaaatgcatcaagagccaatcgatgttaatgcgcttgttagtgaagtctgtaatttgctgcaatttgaattgaacactcgctctttagagtttgacgttgattacgacagctcttcgcagttagtgatttacaccgatcctattcggttaaaacaagtgctgttaaatttattaaataatgctgttaaattcacaccacaggggcatatcactctacgtatttggcaacagcgtgagtttacttactttagtgttattgataccggtattggtattagcaaagaagcgcaacagcgattatttcagccattctcgcaagcagatagttcaacctcacgccgttttggtggcacaggtttagggttaagtatttgccaaaaattggtttcgatgatgggtggcagtatcagtttgcaaagcgttgaagggcaaggttcaacgtttactatttcaatcccttttgagtcacctttatcagaggttatccaaagtgatgatgaggttgttgatattgatgtcagctcattatcattcgcagattacgcaatacttttagttgaagataacccgctaaatcagcatgtcgctagctctattttaaaaaccaaaggctgtcagcctgatatagcaaaagatggccacgaagctattaagatgattagtgaaaaaagctacgaccttgtactaatggatattcaaatgcctaacatggatggtctgcaagcgactaaggttattcgcaatgagctgctgatctccgagttaccgattattggcttatcggcaaatgcccatgatgatgaccttaagaaaggcctcgccagtggcatgaatggttatctaactaagccaattgacgctgataaattgtttaaaacattgtggcagcatctgcacggcaaaagtgctttataaagcagacaattgacctcttaaaagtaaatatattcatctacacttgaattatcgttgtgggtacgtatgatccgcgaaaattttctgaactgagtactaattatgatcaacaagacacttcctttgcttgatattcatcgtcatcttgacggtaatgttcgcccacaaacgatcttagaacttggtcgtcagtttaatcttgaattaccagcagatacagtagaggcgctgatccctcatgttcaggttattgaccctgaaccaaatcttgtcgcctttttacagaaattagattggggtgtaaaagtactcggtgattacgatgcctgtcgtcgtattgccatcgagaacgttgaagatgctattgcacaaagcctagattacgtagagcttcgttttagtccatattatatggcgcaaagccaaggactgcacccgcaaggtgtcgtagaagcggtggttgatggtgttaggagtgcgtgtcaaaacgcaccaattaaagccaacttaatcggtattatgtcgcgtacttatggcactaaaatttgtcagcaagagcttgatgcattacttgcttttaaaaatgatttagttgctgttgatttagctggtgatgaaattggtttccagggtgaattatttgttgatcactttaagcaagttcacgatgcatacttagctgctactattcacgctggtgaagcgcgtggtagcgaaagtatctggcaagcaattaacgagcttggtgcaacgcgtattggccatggtgtaaaagcgattgaagatgcagcgcttatggatcacttacgtgataaacgcattggtattgagtcttgcttaaccagtaacattcaaactagcactgttgctgagcttgcaaaacacccgttaaaaaccttcttagaccatggtattttggcatcaattaatactgatgatccggcagttgaaggtattgaaattgcgtatgagtatcaagtagccgcgcctgcagctggtttaagccaagccgatatggaaaaagcgcaagctaatgcgcttgaaattgcttatttaagcgaggcagataaagcggctttaaaacagttagctgctaatcgttaagcagctaacttacacttggtgctcttggcatgagacatagttttcatacaatgccttgagcacatctcctcggctgatcataccaacaaccttaccaccctcgattaccgggtaattctttggcttacctgttttcatggcatctgccagctcaatgatattttgatcgctacttacggtaacaacatcggtgcgcataagttgttttacctttaccacaccatcgcagaaataactgttttgcatcagcggttgcaaaagctcttgttcagatataaagccaactaggcttttgttgtcatcgaacacaggtgcgcccagtaatttaaacttttgcagctcgctaatagcggtggtcatttcagtttcaggcgtaatgtgtggcaacttacgttgcataaagtcttgtacttttgtatttagcatttgggtctctccccatcgttattctaatcagagtatggtcaaggaaatgctgtttgtgaaattgtttagatggattagggcgataggtaaaacaaataaaaaaggcatccaattggatgccttaaaaataatctgtatcacttagctatttaatgaatgcaaatgcatcggcatacatgttttcgcggattgcgccatgatttatgaaatcatcgcgaacaacgccaatcatgtcgaagcgacctgccatgtaaatatcgtatggttctagcgacacgatatctgccataacggctttgtgaacgtaaccagttttgcctgtccagctttgcgacgcattttcaactacaggaatgtattggaaatgagggttactgtttgcccatgcttgcatttcgtcatgcgcatatagcgcagcttgctcacgtacaccccagtagaataataccgggcgctcacagcctatttctgcaaggtgatcagccattgatttggcataagaaaaaccggtgccgccagcaagtagaataatagggcgctcaccctctacacgaagttgcgatatgcctagacccacttcaacattaacttgttgttgctgagcatgtgcttgacgcaaatgatcaagcgcttgcatcgcgtatgaatcagcacctgaggcaccaatgtgtagttcaatttgctcagtttgcgacgggcggcttgcaatagaaaaggcacgcttatctttttcgcctaatacaagttgcatatattggcctgcctcgaatgacacaggttgctgtggtttcaaaatgaccttatgtacgtggtctgtaagcgggctgatcgcaacaacgtcagcgagtaatgtttgcatagtttacctttataagcacagaagcaaattcggttatgaatcgcactcataaccgttaaattttgagcagtttaacatagacacagcttagagaatatctaagctgtcccataattcatcaactcgttctttgatttttggatccatgacaatgggctcaccccattcacgatctgtttcaccaggccatttattggttgcatccatgcccatttttgagccaaggcctgatactggcgatgcaaagtctaaataatcaatcggtgtgttttcgattaacgttgtatcgcgcgcaggatccatacgcgtagtgattgcccaaattacgtcgttccagtcgcgtgcgtttacatcgtcatcgcaaacaatcacgaacttggtatacataaattgacgtaagaaagaccatacccccatcatcacacgcttggcatgacccgggtattgttttttcatcgtgaccaccgccattcggtatgaacacccttcaggtggcagataaaaatctacaatttcaggaaattgtttttgtagaattggcacgaacacttcgtttaaggcaaccccgagtaccgccggctcatctggtggacggcctgtgtaggtactgtgataaatcgggttttcacgatgcgtgatgtgagtcaccgtcatgaccggaaactcgtctacttcattgtagtaacctgtgtgatcgccatatgggccttcaggggctgtttcacccggcataatatggccttcaagtacgaactcagcggtagcaggcacttgtaggtcatttgaaatcgacttaacaacttctgttttactaccgcgtagtaagcccgcaaacgcgtattcgcttagggtgtcaggtactggcgttacagcgcctaggattgttgcagggtctgcccctaatgcgaccgatacaggatagggttcgcctgggtgctctttacaccattcacgaaaatctaatgcgccaccacggtgcgataaccaacgcataataattttgtttttacccagtagctgctgacggtaaatacctaagttttggcgctttttataaggccctctggtaaccgttaagccccatgttatcaaaggtgctgcatcacctggccagcaatgttggataggcaacttggttaagtcgacatcatcaccttcaagtatgacttgctgacatggtgctttttttacttctttagcgggcatattcaacacttgtttgaataccgggatttggcctagtgcctctttaatgcctttaggtggctcaggctcttttaaaaaggctaatagcttaccgacttcgcgcagctcactgacatcatcttgacccattcccattgctactcgctttggcgtaccgaataggttagcaagtacaggaatagagtgacccttaggattttcgaatagcagagcagggccttctgcacgcaatgtacggtcagcaatttcggtcatttcaaggtagggatcgatttcttgtttgatccgtttaagttcacctttttgttctagtagctcgataaattcgcgaagatctttgtatttcattctggtcgcttaaacgctaaataaattgtcgctattatactcaaaaccattaattaagcgaatttagccgcgacagtttggttagctttgctttagctgacaatgatatttttttcctttcaaaataagcatggcttcgtcgcctttagaccaaaacaacacatggtcatcgctgtactttacgcctgaaccactgacttctcgatataaagtgtaagtattatcgacgaatgaaagcgttgcttcgtcttcattattatcaacaatactcgcagttaagccattatcacatagatagttgtttgccgtggcttgctcagcacacgcgcacaaagtgactaaagcgagccctgagagaagttgtttgttcatggaaacacccctgtttttgaatgaactctaagcctaacaaagaaaaattaaccgttggtgaaaatggctggataagttatgttgacagtgtacttaatgggcaaggaaccaccatggctggcactaatttattaaccttacttgatgatattacaactcttttagacgatattgcgactatgagtaaagtcgcaacaaaaaaaacagcaggggtgttaggtgatgatctagctcttaatgcccagcaagtgacaggggtaactgctgatagagaattaccagtggtttgggcggtagcaaaaggctcattcattaataaggccatattagtgccagcagctttgttgattagtgtttggttgccctggcttattactcctttattaatgattggtgggctgtttttgtgcttcgaaggagctgagaaaattatcgaaaaactgtttggtcacgatagtcacgaaggtgagcaactggttgagcagcaagacttgcaagaatacgaaaagcaaaaagttaaaggcgctatccgtactgattttatcctctctgcagaaattatcgttataacattaggcacggttgctggtgcaacgctggtaaatcaagctttagtgctcagtgtaattgcaattattatgaccattggcgtgtatgggttggttgcaggcattgtcaaacttgatgatgctggtttgtatttactgcaaaaagcgcagcaaagtggcggtaaatttaaagagctagtgggtaagtttttagttgctgcagcacctaaactaatgcgctttttagcctttgcaggaacggttgctatgttcttagttggcggtggcatattggtacatggtatccctcttttacatcacgcccagcagggtagtactgagtttgtaacgggtttacttggtaaaacgggtgagctggtttcgccggttatttttgatggtttgttgggagttgttgcaggggttgtgattgtcatattcgttagtcttttcaagaaaatttcaaagtagctacgcgttgagggtgtacccattgttaactttttagtatctttattaacaattaagatataaaaggaattttatgagcagattaataatcgttatttcttgtttgctacttagctttactactaatgccaaatctgaattacttgatattcaaaactttagtaaagcaagtgaattcacaggtgttaaaatttctcctaccggtaagtatttagcagtaatcacacaacctgaaggcaagaatgctttaatgatactggatacagatacatttaaagtgcttcatgccatccactttcctggtaatgctcaagtcggcaactattactgggtgaatgaagagcgtattgtattagccaaagagtacctaaaaggttggaaagatcatcctgaataccatggtgagttgcttggtgtaaacgcagatggcagtcaatggaagtacttggttggttatcaaggtgaaaggcaaacaggtacgagaattaaaaaggcaacccctgtattagggacatcttatgtgcttgatccactggtagaaaataagcgtaaaatgttagttttaaccattccatggacagctgccaacgaacctcacacaattgtatatgaagtagatgtctatcgagggtcaagaaaaaggatcacacgttcaccttcaaggatggctagttttctgactgatcatgaaggtaacgtaagagtatctgcttcgactgatgattatattaatccaaaaatatatatccgtcctaaatcaggtggtgagtgggaagagctcaacttaaaggacgtttcatatagtgatgttgggttgcatgcttttgatagcacagatgaatctgcttatgtgacggcttctgttaatggagaagctaaagggctttataaattaaatcttaaaactaaacaatttgatctaattcacaaagaaaagagtgtttcacccaagcaagtatgggtggatgaagtctcaaaagagctttttgctgtcgagcatgaattaggctatccaacctattcatttgttggtaataactctaagaaaagtcagcagctaaaagctcttttgaaagtacttgaaggtcagcaggttcaattagttagcagtaccgtaaatggtgataagagcgtcatttttgcttcaagcgatactaacccaggcagttattatttatttgatgcaaaaacgaataatctcgattttctattctcatcgagaagttggattaaacctagtcaaatggcgattacaaagcctatcaattttacagcacgtgatggactagctatctacggttacttaactattccgaataatgctgaagaaaaaaacttaccattagtagtaatgccgcatggtggtcctcatggtcctagagattggtggggatatgattcaacagctcagctgcttgcgagtagaggaatagctgtactcaaggttaactttcgtggttcaggtggttttggacgaaattttgaacgtgccggtcatcgcaagtgggggcgggaaattcaatacgatatcattgatggggtaaaatatcttatttcgaatggtactgttgataaaagtaacatttgcattatgggtgccagctttggtggatattccgcgttacaaagtgcgatcttggaacctgatatgttccagtgtgcgattggggttgtaggtgtatatgatttaccactcatgtttgatgaaggggatgtatcagaacgtgatagcgggcaacgtttcttagaagtagtattaggtgaggatgaagaagagttaaagcgtttttcacctagctacaatgtagaaaagttgaaagccccggtattaattgttcatggtggcgaagataaaagggcgcctatagagcaagctgagtcgttaatttcggctttaaagaaagagaatcatccttatatttatgaactattagatgatgaaggtcatggcttttataaagaagagcaccgtactctttactataaaaaggtattggcgttcttaaatgatcatttaaaactttaaataaaaaatgccggcgagaaacctcgccggcaaggatttagcacgggaacgtaagcgtgctagtgtgcaaggtcttccttcaagttatacaaactcaaaagacgattcgttcactaagtaatacagcccagttgcaatttaaaacagagtagggagagtgactctgcttttgctaacacgcatttataaaaccaacaaaataatataaatactgcgccacataaaaatgttataacataacaaaaccaaagtaaatagcgagagtcatattattagcttggtttcttctcagtgatgtttatggtaattgattattgagtgtccagtttactacaatcgtaactcaagcatagctctgcgagttcaatcttcgctttcggattcccttgtaaggtggctttgttaagccagtaagctgctttttcgttattgatttctgtaccttggccatctcgatacatctgacccaagtttaattgaccccatgaataacctcctttggcagagagtgtaaagctttccagtgcttccttaaacaggccatctttaaaataggtgatgccttgttggttatgtttatcaagcttaacgcctgcatacaaaggcttaggtttcggggggtgcataacaaaaccaccatacaagctatatagctctggtcgcattattttgtatatgctgttgtcttcataaaactgctttacttgctgtttagtaaaggtcatggttttactcgaaaagtaatcatcttgcactagcatgctggtacgcatcgcaatctcgatgtctttattgtacttgtaagtgtagttagcaactcgaaaagtcatgctcttgtcatcaaattcaacgagttgggctactttcagattatttatacgttttggttcaccagtaaatttgtcggaataaacaaaataggtgtcgaattttttgggttcattcaggtagcgaatttcattatctgcttgctcatgtatcccaagtattgctttcgttaaaatataaactattaataccaagccaataaaatattttatgaaagaagccagctctaggggtggaagagaataccaagatacagctgatgtgtagccacaagcatcgcattggtgctgataattaattgataatggaataattggcaaaatactaaagcgcagtactttactgtgattactcagtgagaagtgctcgctatgacaatgaggacacgttttttgctttttgtaaaaaatatcagcagcggcggtgttaaataaaagcatagtttcttcctgaaggttgctttcaataaattagaacaaacacgctgagttaggaagccgcaaactgtaactaaatatgaattaagtgtgtagatagctcttttcgtttagagaaacaatgcattctctgctatgatccactgcatcttcgaggatgtccctcaattatcaagtttggaatattactgtgactgctactgctttttcatctttggctttgccgaaagagttaaccgataatttatcgactttaggttatgcgcaaatgacaccggtacaagcgcaaagtttaccagtgatcttgcaaggcaaagatatcattgctcaagcaaaaacagggtcgggtaaaacggccgcgttcagcttaggtgtgttggctaagttaaatgtgaaacgttttcgcattcaatcacttattttatgtccaacccgcgaactggcagagcaagttgcagaagaagtccgtaagcttgctcgcggcattcataatattaaagttttaactttatgcggtggtgtatctattggtccacagattggttcactagagcatggcgctcatattattgttggcacaccaggtcgtgttgatgatcatattcgtaagggtacattgcgtttagatgacgttgaaacattggtattagatgaagctgaccaaatgcttgatatgggttttcaagatacccttgatgccattgttgaatgtattccaaatcaacgccaaaccttgttgtttagcgcgacttatccaaaatcaattgcagcgattgctgagcgagttttaagcaaccctgaaatgattaaggttgaagaagagcaaacaaaaagcacgatcacacaatacttttacaagcttgataataacaagcagcgctttaatacgctgaagctgttgcttttgaagtttcagccagaaagctgtgtggttttttgtaatactaaggttgaaacacagcaaatttgtgatgacctatacgctgaaggctttagtgccgttgctttacacggtgatttagatcaacgcgaacgtgaacgtactttaattcgttttgctaataaaagcgcgtgtatcttggtggcgacggatgttgctgcacgaggcttagatattaacgacatggatatggttgtaaattatcacttagcacatgatccacaaactcatgttcaccgcgttggtcgaacaggtcgagcaggtaaaaaaggcattgcatgttctatttatggtgaggctgagcaatttaaagtggcacaaatcggtgatcattacgaacgcgacttcaaccctgagccactacctccttttagcttacttgaaaagccggcctacaagcctacgatggcgaccatcatgatcgatgcaggtaagaagcaaaaaattcgtgctggcgatattttaggtgctttaacgggtaaagaaggtattgcaggtcatcaggtgggtaaaattaatgtacttgataacgtggcttttatcgctgtagagcgaacagcagccaaaccagcactgcgcaaattgaccgaaggaaatatcaaaaaacgtaagattcgtgcgcgtcgtttaagtcgataagtttaaagtttacgagcagctagcttttagctgctcatactcacgttgtatttttttaaactgaatcgcacagccttgacggtctgggtgatgctttaaagccagttgtcgccagcgcttttgtaattcttttagtgaaaagttagcaggcaactgccatgctttttgtatttgcaaaagctgctcttttgtaagatttgcagtagtagtatgcctgttgaatgtagcaaatcgctgccaaaactcatttaatagcgcatcaatttcatcacttgttgtgtcgtagttttgccaatctaaataatactcccgcaaaggatcagtattttctagcaccttttcacacttgttatttatcaattcaatatgtaaggccgctatgtgcaattgttgctcagggctaacctgtatttggagttgatataaggcattcataactaagaagttacgtttaaaaagatctttttgtgggtccttatctaaaacactaagatgtcctgcatcattaagtgcactcgcaagcgtatggactttccagataggctgtttcagaatgaggtaaaaaatctcatctatcagtgggttaagcattgttagcaggccaatctttatgtaatctaaaactatatacgctatcacagctgccttactgaaactatgtttatattttcatcaaggaaggcatttagccgagctacgatttagttttttcctcggtctatgttgatatttagggatataaacatatgcgcacattattgagtctcaggttaatacattcggcattagtatgctgtagtgtgctgatgactacgtttagttatgcttcagattcattactagagcaatttaatcagtcacaaaaattagatgaaaagcagcaattagcgacacaattacttgcagataccactattagtgctgatgaaaagctggctatacaattgcagttagcagatacggctctagaaaataaagaatttgccgcagcatttaaacactatcaactagctgagaagtcgacctcttttgaagctcaaccagacagttattttcgcgcaatcaaaatgcaaggcgttagctattattatcaaggtcttatccaacaagctgtcgaatcctatacacgtgctttacgcgttgccgaaaaaatgaatgcgcctatttcagaggctaacttactgagtaatataggtctcgcttattttgatatgtgggatatgagcaaagcacttgattattacacgcgcgctaaatctatctacgaaaagtatggtagcgcgcaagataaagctgatattttgcataacatagcgggtctttatattcgcttatcgagttacgatattgctttagatatgtatagagaaacgctaaagatattcgagaaattaggtgatgaagaaggtgttgctcagtcatatggtaatatgggcgttgcttactctgagcttggacaatatcaattatcattacattattatcagcgtgcattacggtattatcaaaaaacacatgatgcctattacttatcctctcgtcacgtcaatattgctaacgtttacttacgaacaggtgatttagaactggctctaagccatgctgataaagccatcgagtttgcagaacaaataaataacaaaacgttagagctcgcgggattattatcaagagctaaaattgagctcttacaaggtaagctaacacaagcggaagtaacactgaccacctcaattgagatggccaaaaaatataaagatgatctgagagtgcaggatggcattggaatgcatgcattgatcaaagcaggccaaggagatttcaccggtgcggtagctcattttgatcaattcgttcgaaccttaaaggccgcaaacaatgagcgacttctaagatccctaggtgagcttcacagtcgaattaatgccagtcagttgactcaggaaattattgatttaaaacaaaaacagcgagtgcaagagcttgaaatgtcaaagcagagacaacttgccatcatgctgtttattttatttattatgctggtcgtgacgggcatcaccatttatcgacgtatgatcgaaaaaggagcgaaagagcaactttcattgatggttgcaaagcgcaccaatgagcttgaagaaaccgcagaaaagctgcgcagtgcaaatgaaattaaaagtcaatttttagctaatattagccatgagatccgcacaccattaacggctattttgggacaaacagataccctaatgaatggtttttataaaccagagcaactcaatgatgaacttgctgttattcataaacaaagtgaacacttaaaagacctcataaatgatgtgcttgatattagtaaaattgaggcgaataaacttgagttgagtttaaaagaaggtgatttagtttgcttattaaatgatgttcattcaatgctaagtgggcaagcaaaagcgaaagggctgaaatttgcatttcataaccaattaggtgagcagtttattactcggttagactttacgcgggtaaaacaaattttgatcaacttatgtgcgaatgccattaagtttacccatcaaggtgaagtcgagctgcaggtcacacagacgcaacaaggtatttgctttcaggtaagtgatacggggattggcatggatgctagccagctgaaacttatttttgagtgcttcagtcaaggagacaatagcattagtcgacggtttggtggtacggggctagggcttagcttatcacaacaactcgcaatcatgatgggcggctatattagtgtcgagagcgaaatcaataaaggtagcgtgtttgcattctatttgccatgtaaagaacatgaacccagtcaaactgatgccaatagcaaatacggaagtgacttaccgcaatcactaaaaggattatctggaaaggtattgattgcagaagatcatgccgataaccgtcgtttaattcgccgttatttagagtcaatggggttagatgtaattgctgttgataacggtgcaaaagcggttgagcaatgtttaatagagtttccagatgtagtgcttcttgatattcagatgccagttttagacgggttaagtgcccttaagttattgaaagagtcgggctttacccaaccaatttacgccttaactgctaatgcgataagccatgaaatagaagcgtacttgcaggccggttttacagggtatcttgctaaacctatcgacaaaaatgtcttttttacgcagcttgccaagcattgtaaaaataccgcagaaagcacaaaagcaagtcacgatattagtgatttagtaactagctttattcaaagttttaaccaagaagcgtcgcttattcaattgcatttggctgaatatgatttatttaatcttcagcaagatgcacatcgtattggcggagcagctaaaatgtttgccatggagcatatcgcgaaaagtgcctttgccttagagtcagctttaaaaaataaccaactctcagaattaacaaatttagttgatcgtttacttgagcaactcaacagtgcattagctgatcagaatagctctacatcaccatcttgagcttgttctgaatcattattttgagttgtttcatagcgagagcgatcgatacgttgttcactacttgtttctgggtgtgtgatcttaaacattgaaagtttatcatcaataacatgcgctagacgcactaaatctttgcttgagacagcttgtatttgtgaacttgataatgcgtcagaatttagctcaaccatagcatcaatactcatttgtgcttcatctgacatttggctttgtaaggcaacctgttcatgcacgctctcagaaaacgcgttaattgctaacatagcctgttctattttattcgtttctttggttgatgcttctgatagttcaacagtacgctgtgtttcttttaatgctgtttgcatcaattggttggctttttctgtactgtgttgaattttcgcaaccatctcacgaacttcttgggttgatttactggtgcgtgctgctaagtttcgtacttcatcagccacaactgcaaaccctctcccttgctcaccagcacgtgcagcctcaattgctgcattgagagctagcagatttgtttgttcagctatactgttaatcacatcaattacagagccaattgcatcactatcttgtttaagtaaaataatttgttcgctagtttggttgatattgtcggccaatttcataaggctagcttggcttttgtcggcatcaagtcgagtttgttgcacagactttgttgcatcagagaccgagtgaaatatttcttcaaggctacggtcaagttctttcgatacttcaatcgttcgctttattgtctctgctaaatcaacaccatgcgcatcttgaattgttgctttttgggtcattgatgcataggtgtcacgtaacgcatcagccataggtaataagcgggcagatgacgcatatatctctcctaacatatgctcaaccatagttaaactcgcgtttaatatgtggcaggcttcaggtaatttattgtcgttttcatcaaaacgaaaagtaaagtcgataccctgatcagaagtgatattagaaacaaaataacttaagtgatcttgttgctgcgcgtcttttaaataaataaaggtaattaaaataagccaaggaacaatgaccgttaagccgattactgccatcgcgacaattgatagttcaaaaataataaaactagcaatactacttagtaagctgatgacaaagagagcgactgctactttaatgcgggtcattgaaaaatccttaccttttaatcctataacttatagaacaaaacccaactaaataccaactatattacggagttatttatagttgaatagcgcttcaaccgtacttttaagtaaaaaaaatgcctgtataaaacaggcattttttttgattttgaaagctgcttattgacgcttcatcgaatcgaagaattcatcattggttttgctcatagaaagcttatcaattaagaactccattgcgtcaatttctgacatctcatgaacaatcttacgtaagatccacattttctgtagttcatctggcttagtcagtaactcttcgcgacgggtacctgaacggttaaagtcgatcgcagggaatacacgcttttcagcaatcttacgatttaagtgtagttccatgttacctgtgcctttgaactcttcgtagattacttcatccattttagagcctgtatcaataagcgctgttgcgataatcgttaagctaccgccttcttctacattacgtgctgcaccgaagaaacgctttggtttgtgtaatgcgttagcatccacaccacctgttaataccttgccagatgaaggaataaccgtattgtatgcacgagcaagtcgcgtaattgagtctaataagataaccacatcttttttgtgctcaacaagacgcttcgctttttcaattaccatttcggctacttgaacgtgacggcttgctggctcatcaaatgttgaagcaataacttcacccttaacaagacgctgcatctcagttacttcttcaggacgttcgtcaattagaagtaccattagctcacagtctggttggttgtagctgattgactgcgcaatattttgcagtagcatcgttttacccgctttaggcggtgcaacgattagggcgcgctggcctttaccaataggtgatgctaaatcaagtacacgagcagtgatatcttctgtactaccattaccacgttccatacgtaaacgctcgtttgcgtggagtggggtaaggttttcaaaaaggattttagtgcgagagttttcaggtttgtcgaagtttacttcgttgactttaagtagtgcgaagtaacgttcaccatcttttggtggacggataaggcctgaaattgagtcaccagtacgcatgctgaatcgacgtatttgactcggagatacataaatatcatcaggtccggctaaatatgaggcttcagatgatctcaagaaaccaaagccatcttgtaagatttctaatacaccgccgccataaatattttcaccgcttttagcgtgtgctttcaaaatggcgaaaataatgtcttgttttcttaaacgggctacgttttcgagccccatggactcagctaagtttacaagctcttttatagacttgtcttttaattcgcgtaaatgcatattggtgggttctttattacaattatcatactcaaaatcatagtttgatacatgagtgaggtttgttggtataactaaggattagttggctttataaactagcaggtcactagcaaggcgtccagtctttaaacaaaataaagctaaaaaaagggcaaaaagccctttttttacattatcagttagatgttgttctctaaaaactcaactaattgagtttttgaaagtgcacctactttagttgctgcaacctgaccatctttgaaaagaagaagtgttgggattccacgaataccaaatttaggtggtgtgcccgcattttggtcaatgtttaatttaccgatagttacacggccatcaaactcgccagctacttcgtcaagaataggggcgatcattttacaaggtccgcaccattcagcccaaaaatcaacaagtacaggtttgtctgattgtagtacgtcagcttcaaagctatcgtcagttaattgaataattttctcgctcattgcgatctccgataagttaggcgaaatatttaatgcgtatttaaacactcttgtttcttattgcaagtttaaacgttatgcttaaacgctatgactaagacacatttgaccgataaaaagttttcagactttgctatcgcaccggaagtggttgccggtttaaccgaaaatgggtttgaatattgcacacccattcaagctaaatgcctaccttttatttgtgaaggccgtgatattgcgggccaagcacaaacaggtacaggcaagacgttggcgtttttaacagccacgtgccatcggttattacaatctagcaaagcacctagtaaacatccaagagccctgatcatggccccaactcgggagctggcgattcagatacacaaagatgcaaaaattttagcgccacactgtaatcttaacttaggtttagtatatggtggcgaagattacgaaaaacaacgtgcacaactagaaaaaggcgttgatattttaattggaacgactggacgccttatcgatttgtataaacagggttgttacaccctaaatgaaattgaagttgtggtgcttgatgaagcagatcgtatgttcgatttaggctttattaaagatattcgcttcatgtttagacgtatgcctgaaacctcagagcgtttaaacttattattctctgcaaccttatcgtatcgtgtgcaggaattagcgtttgaacacatgactaacccagagcatgtgcaaattgaacctgacgttaaaacaggtaagcgtattcaagaagagctatttcatccatcgcaagacgataaaattaagttactgttaactttaattgaagaagaatggcctgagaaagcaattgtgtttgcaaatacgaaacacagttgtgaaaatgtttacgcatggatgaaagcggatggtcatcgagttggattattaaccggtgatgtaaaccagaaaaagcgtcaatcaattttggctcaatttaccaaaggcgatttggacttcttagtggcaacagacgttgcagctcgtggtttacatatcccagaagtaagtcatgtatttaattttgatttgccagatgattgtgaagactatgtacaccgcattggtcgtaccggacgtgctggtgcttcaggacacgctattagctttgcctgtgaacagtatgcctataatctccacgaaattgagcaatatatagaacacagcattccattatcacattatgataaaagtgcattgcttgatgatttaactaagcctactattcagaaaaagcggaactattctacaggcccacgtaatcgtaataacaacggacgtcgaccaaataatagttaccagaaatcacggtcgtgataaacgaccgtcattgaagacttagtagtaactagaggtttttgaacggtggggcaatttcaaccgcaaaaaaatgtgtatgcagtaatcgatttaggatcgaacagctttcatatgctgattgccaaatcaattgctggcggtctacaaacgatcggtcgagtcaaacgtaaagtaaggcttgcagcagggcttgatgaaaacaacgtcctaagctcagaagccatgcagcgaggttgggaatgcctagccttgttcgcagaacgtttacaagacataccaaagaaaaacattaccattgttgcaacagcaactttgcgtcttgctaccaatgccgatgtgtttaagcaaaaggctgaacaaatccttggtcataaaatcaatgtcatcagtggtgagctagaagccaaaacgatttacaaaggcgtggcgcacacatcagcttgtagtggaaagcaacttgttatcgatattggtggggcgagtacagaggtcgttataggtaaaggttttgacgcactgcactataaaagcctacatatgggctgtgtcacctttttagagcgctatttcaaagatcaaaaactgagtaacgaaaattttgcagccgcgattcaagcagccagagatgtgattgctgaaattgttgatgaatataaagcggcaggctggcaaatagcgagtggagcatctggtacagtgcaagcaattcaagagatcatggttgcgcaaaaccaagatgaactcttaacgcttgataaattgtatgccatcaaagagcaatcagtgcaatttgaaacaattgcagatcttgagcttgcaggtttaagtgaagaacgccgccttgtgtttgtatctggacttgcaattttaatcgccttattcgaatcattagctataaagcagatgggccttgctcgcggcgcattgcgtgaaggtgtgctttacagcatggtaccagagctacataaccacgatattcgtaagcgtacggttgatggattaatggctcgttatcatgtcgatgtaaatcaagcctgccgagttgcacaacttactgagcaattagcaaagagtgtaaaggggcagtggcagtcaattgataacaacgcaattgcgttattaaaaacggtagcgaagttacacgagataggtttattaatagagtataaactttatcataagcacacagcctacattatagaaaacaccgatatgccaggtttttcacaatctgagcataagctgatcactgctgtagcgaatgcgcatcgtgcagatctggtaaaaaacagctttgcatacctaggatgtcatgaacaattagctgaatgtttgacaagaattgttcggatcgcagtgatcttatcaatgcgtcgccaagatgatgtactgccagcactcgatcttagtgttaatgaaaacacccttacactgacatttgatggcgattggttaaaatatcacccattaatggccagtgaactgcaattagagaccaagctacaagcaaaagcaggttggaagcttatagttaaataaacagaaaaggcccagaagggccttttttagtgttctttttgcccgtttcgttcgtattttgctcgaacagtcatttttttcataaaaacttcaaaaaacagttgatctcaattcggatctccctataatgcgcatccatcgacacggcggactgcttacaaacaagcaaaacaacgagtcgattgagtcaagtaaaactgagttttgaaaaaataaatttttctcaaaattaagtgttgacaaaaataacggcttgcgtagaatgcacagcccttgagacgcaaaagtatctcaaaacgttctttaacaatataaagcaatcatctgtgtgggcactcgtacagattgagttctaacagcagattctagttcgctagatgacgcaaacaaatttagagtctcaattgaactgagtgaccaacggaaacaagtttacttgtttcagcacagtcaattcgatatcgaaagatatcaaaattcagaattcattgagcatgtccttcgggacagaaaaaacttttaattgaagagtttgatcatggctcagattgaacgctggcggcaggcctaacacatgcaagtcgagcggtaacagagagtagcttgctactctgctgacgagcggcggacgggtgagtaatgcttgggaatatgccttatggtgggggacaacagttggaaacgactgctaataccgcatgatgtctacggaccaaagtgggggaccttcgggcctcacgccataagattagcccaagtgggattagctagttggtgaggtaatggctcaccaaggcgacgatccctagctggtttgagaggatgatcagccacactgggactgagacacggcccagactcctacgggaggcagcagtggggaatattgcacaatgggcgcaagcctgatgcagccatgccgcgtgtgtgaagaaggccttcgggttgtaaagcactttcagtaaggaggaaaagttaagtgttaatagcacttagctgtgacgttacttacagaagaagcaccggctaactccgtgccagcagccgcggtaatacggagggtgcgagcgttaatcggaattactgggcgtaaagcgtacgcaggcggtttgttaagcgagatgtgaaagccccgggctcaacctgggaactgcatttcgaactggcaaactagagtgtgatagagggtggtagaatttcaggtgtagcggtgaaatgcgtagagatctgaaggaataccgatggcgaaggcagccacctgggtcaacactgacgctcatgtacgaaagcgtggggagcaaacaggattagataccctggtagtccacgccgtaaacgatgtctactagaagctcgggtcttcggacttgtttttcaaagctaacgcattaagtagaccgcctggggagtacggccgcaaggttaaaactcaaatgaattgacgggggcccgcacaagcggtggagcatgtggtttaattcgatgcaacgcgaagaaccttacctacacttgacatacagagaacttaccagagatggtttggtgccttcgggaactctgatacaggtgctgcatggctgtcgtcagctcgtgttgtgagatgttgggttaagtcccgcaacgagcgcaacccctatccttagttgccagcgattcggtcgggaactctaaggagactgccggtgataaaccggaggaaggtggggacgacgtcaagtcatcatggcccttacgtgtagggctacacacgtgctacaatggcgcatacagagtgctgcgaacctgcgagggtaagcgaatcacttaaagtgcgtcgtagtccggattggagtctgcaactcgactccatgaagtcggaatcgctagtaatcgcatatcagaatgatgcggtgaatacgttcccgggccttgtacacaccgcccgtcacaccatgggagtgggttgctccagaagtggatagtctaaccttcgggaggacgttcaccacggagtgattcatgactggggtgaagtcgtaacaaggtagccctaggggaacctggggctggatcacctccttatacgatttagaacttatttgttcgtagtgtccacacagatgattgttagttagctaaaccgtttggtttaactaattaatatgctctttaaaaatttggaaagctgatattaaaattcttatagatacttgtatctataaagagttttcaaaagtaaaaatatgccagttaatcagcaatgattaatcggtatctactttagtattctcatcattatttgatgaattaacttctggcgaagttaacagctgtcactaacaaagacccgtttgggttgtatggttaagtgactaagcgtacacggtggatgccttggcagttggaggcgatgaaggacgtattaacttgcgataagcctagtcaagctagtaaaaagcgcttgagactaggatttccgaatggggaaacccacctgcttgcaggtatcttgcactgaatacataggtgtaagaggcgaacgcggagaactgaaacatctaagtacccgtaggaacagaaatcaaccgagattccggaagtagcggcgagcgaaaccggaccagcccttaagcttattatgtgttagtggaacattctggaaagtttgacgatacagggtgatagtcccgtacacgaaaatgcatcttaagtgaaatcgagtaggtcggagcacgtgaaactttgactgaatataggtggaccatcatctaaggctaaatactcccaactgaccgatagtgaaccagtaccgtgagggaaaggcgaaaagaacccctgtgaggggagtgaaatagaacctgaaaccgtgtacgtacaagcagtaggagcccacttgttgggtgactgcgtaccttttgtataatgggtcagcgacttatattttgtagcgaggttaaccgattagggtagccgtagggaaaccgagtcttaactgggcgtatagttgcaaggtatagacccgaaacccggtgatctagccatgggcaggttgaaggttgagtaacatcaactggaggaccgaacccactaacgttgaaaagttaggggatgacctgtggctaggagtgaaaggctaatcaaaccgggagatagctggttctccccgaaatctatttaggtagagcctcggacgaatacttacgggggtagagcactgttaaggctagggggtcatcccgacttaccaaccctttgcaaactccgaataccgtaaagtactatccgggagacacacggcgggtgctaacgtccgtcgtgaagagggaaacaacccagaccgccagctaaggtcccaaagtcatagttaagtgggaaacgatgtggaaaggcccagacagccaggaggttggcttagaagcagccaccctttaaagaaagcgtaatagctcactggtcgagtcggtctgcgcggaagatgtaacggggctaaactatgcaccgaagctgcggattcatactttgtatgagtggtaggggagcgttctgtaagccgttgaaggtgacccgggagggttgctggaggtatcagaagtgcgaatgctgacatgagtaacgataatgcgggtgaaaaacccgcacgccggaagaccaagggttcctatcccatgttaatcagggtagggtaagtcgacccctaaggcgaggccgaaaggcgtagtcgatgggaaacgggttaatattcccgtacttggtataattgcgatggggggacggagcaggctaaacaagcatggcgttggttgtccatgtgaaagtgagtaggttggtgacttaggaaaatccgggttgctaagactgagacacgagacgagcacctaagggtgtgaagttgttgatgccatacttccaggaaaagcctctaagcttcagattataccgaatcgtaccccaaaccgacacaggtggtcaggtagagaatactaaggcgcttgagagaactcgggtgaaggaactaggcaaaatcgtaccgtaacttcgggagaaggtacgctcctatctgtgatgagacttgctctctaagcggacgggagccgcagtgaccaggtggctgggactgtttattaaaaacacagcactgtgcaaaatcgcaagatgacgtatacggtgtgacacctgcccggtgccggaaggttaattgatggggttagttttcggacgaagctcttgatcgaagccccggtaaacggcggccgtaactataacggtcctaaggtagcgaaattccttgtcgggtaagttccgacctgcacgaatggtgtaaccatggccacgctgtctccacccgagactcagtgaaattgaaatcgcagtgaagatgctgtgtacccgcggctagacggaaagaccccgtgaacctttactacagcttggcactgaacattgaccctacatgtgtaggataggtgggaggctttgaagcagagacgctagtctttgtggagccgtccttgaaataccacccttgtagtgttgatgttctaacgttggcccctaatcggggttacggacagtgcctggtgggtagtttgactggggcggtctcctcccaaagagtaacggaggagcacgaaggttggctaagtacggtcggacatcgtacggttagtgtaatggtagaagccagcttaactgcgagacagacacgtcgagcaggtacgaaagtaggtcatagtgatccggtggttctgaatggaagggccatcgctcaacggataaaaggtactccggggataacaggctgataccgcccaagagttcatatcgacggcggtgtttggcacctcgatgtcggctcatcacatcctggggctgaagtcggtcccaagggtatggctgttcgccatttaaagtggtacgcgagctgggtttagaacgtcgtgagacagttcggtccctatctgccgtgggcgtttgagaattgagaggggttgctcctagtacgagaggaccggagtgaacgaaccgctggtgttcgggttgtcatgccaatggcactgcccggtagctacgttcggaactgataagcgctgaaagcatctaagcgcgaagcaggcctcgagatgagttctcactagacttttaaagtctctgaagggccgttgaagactacaacgttgataggcagggtgtggaagtggtgcgagccattaagctaacctgtactaattacccgtgaggcttaaccatacaacgccaaacgcgttttatgacagcgtaacgaacagaagttaagacactaaagtagacatttacttgatatcagaattccagattttagttaattgcaaaagggattaacaaaccaaatttgcttggtgacaatagcgttttggacccacctgaccccatgccgaactcagtagtgaaacgaaacagcgccgatgatagtgtggcatttgccatgtgaaagtaggacatcgccaggctccaaattagagaaagcccgattcgaaagagtcgggattttttgcgttttagctatccacacaacgtgccctgttcaacctacggcaggctttaaactttactcttgctactaaaaaagcccgtattcttcggtttcttcagcttcatggcgcatgaggtgttctggacggaatattgcgcttggatctaacaacaggctatgtttatttttcattttgattaaaccacgcatcatatttttcgtctgaggatcaacatcgaaacccacagaggtgagctgctctaatggtttaatatcttctttttttacgtttatgttatcttcaacttggtcaactaacaggcctatatgaggcgtgataccatcttttgttgtgaagataataattggcttgtaatcaaggataatttgttctcgggctgactcaaataatctgacaagttgattaaatacctgacgttttttttcttcaaaaacactaataactttttcttgaggttggcttttctgtaactctaataattctctggccatagcatgtagttcacgatgaggtgcatcgaacttaacaataatgctgtgtaaatcctcgttatctgttttgaaattattataccagcggccaaattcacacttatcaggatctgttgatttagtgaatggagtgcctgttactaagctgtgctccagcgcatttagccactctaggtgctctttttctcgttctactaataaatctgaaagtgcagtgtttgtatcacttgttgattggttgtttaaaacgatgcctaaatcaaagataggggtgggtgtatccatgtagtcttttacaccaatgaagcttttattttcattcggcaaagatgtcaaatttccttcataacgttcagttagaagtatatcgagaatttttaatgaaatggtcttttgcccgacacgaaaattaatcagatccatattttcctcaaagccttgttaagtctttatagcatagaacattattgctaattagttgtagttaaatttaattacttttgtagtatgagcgatagattttttttatcttatctttatcggggtcactaaacagagcggctagctcactatctctgtcaaaggttttgtttagctggattagtaagcattgattatttagtggtgtagggcattcttttgcggcttctactaaagctgctgcattcaaatagccttcaaaaataattcgattaggggtcacattataaggtttgatatcttccttaaagctattacaccaggcgttttcacatttattagggttggggaccacttctgtgaccattatatttgctgggtgttttacaagagcaaataaatcgtgactagaaacaaatgaaacggatgtaaagtcaggtttgaaaccttgctcatagctggtatttataaattctgctagcggttggtaggttcctaccatacaaacagccgttacttcgctttgcttcagggtttctaaggctttcgatatatctgaactatttcttctaaaacgagctacttcgataggtttgatgccaaactcttctaaagcagtgattaagttgctttcaaccatgtagccaaattcatcagcttgaatgattaagccgatcttttgatggttacgttcttttatcaaatagtttatctgttcaatagcttcatcttgatagctagctcgtaagttaaacacattgggcattgagctattatgcagaaaatcagcgcctgtaaacggcattagaaagggaatgcggtgcctatctagtaatggttttatggcgtgagcggtgggtgttcccatcgagccgaaaatcgcgtgaattttttcggtgtacaaaaactgtcttgtatttacaacggtgttttttggctcatatccatcgtcagcgagtataagatctatattctggccattgatcccttgggttttgttaactttatcgaagtaaattttactgcctagcgcaagttgctcaccgatttgtttggcaggtcctgttaatgcggtagacatgcctaactttatagggggttgcgtatgttgcgctaagctagttgttggtatcaacaccagggttattaaaagggcattgagtacttttagtgttaagtgatttatagtgagcataccaaccttttactgcggttataaactgtgaatcgagttctttacggccagcaaaattagcttcataaataaagctattcacagatgtctgctgtaatactagtctaataaggatgaattttgtattttcatctaataattttagactaattggtgtgtgccatattagttgccacagtaaaggttgtatattgaaaagattgaaatcatcactgatgattcgctctgctctagtggataatgcagcagggcaagcagtgcttggcaaatgcgatactaattgatcaactaactgccaaggtaagcttttaaagtgccctaacaattgcactgatatgtctaacttaaactcattaatgagttgctgtaccaatgaactattttgtttgcaaagtgatttgatcactaaagcagggtgttcagctgttgccttatcatgactaaaaccgagttttacgacatgaaagccattgtgctgccagaatctaacaagcgatgcattagcaccaaaacttgccccaaaatagctacaattatctaactgtctttcgcagtattttaataaggctgagccaattccttgctgatggcattcgggtgctatcgctattcttacaacccgagcagagacctctgtcagaaagtgtgagtctttgcttagttgagtaagtgtttgtgccatcaaatggccatgcggacgacgctgaccggctttaacatgatctgctatatctttagtcagtccaccttcgagagcaaccaagcagacgcctttgagctcatctgcttgagtgcaaataaacaattgtaattcaggcgcatcaagtaattggcgtaaatcattaacactggtttgataatgtgccaaagcaagtaaggctattatctggcctagcagttgctcattatcaacaagttgttgtttgcttacttgtgcaaaattgagagattgttctttacttgtgtgtaggtactttgcatcgagaagtaatagttcgcgtaggctattttcgagggggtcatgtttagcaaaacgaattggctcatccaaagtaatagtctttagagatttatattggctacgtaagtaatgtaaaaaacgtaacgtgtaaccacgcccattcccttcgtaaccaaccatagtgctagcaaatacaattcgtgggtagcttttcaggatctgcaataatagtggaactggaatcgctgctgcttcgtcgacaaacagcagatcgcaatcaggtttttcatttagcagtatatctggcgcaatatagctaaggttagctaattgcttacagttttgctctttgctaacaccaagctcagcagctaaatgtttaaagcttgtttgtacagctttggcttgggttgcacaaataaggatttttttatcttgaagattggctgctgcaaatcctaaagccgctgacttaccacgacctcggtcggcactgatcacaaaaggacgattagcgcgtcctgacgcggttttaataatttgctcaacacatgtttgttgttgctgaaaatttatctcagcagttgctggtgatactgattggtaagcagggagcgagtgctcagtaaaataatgtggctgcaactttagcttggcgaataaacgctgattaaaaaagctgtgttgaatcacttggccataggaggtaatacttgtgagtgcagggtcttgccaattactgtcatcaggcagcaatagtatcagtacacctcctgcttttacggtgcctgcaagtgcggctaatttatcggcatataagccgctaaaaccatcaaaaattgcgtgttgaaactcttgaccaagaatttggtgagcatgttttggaaactcactatttgctaataatgagctgctactgaaaacatagctatttttaagcgcaaattggtttgcaaactgatagcaccaagcttcgctgccttgcactatgacaagctggcgatgctttgcaatcaccagctcgttgcacagtgctgttaaatactcattataaggcttgaagtcttgcatactgtgttacaagccatttactgcctaggtcatcaaagttcacttgaatacgtgactgtgcgccgctaccttcgtaattgagtacggttcctgcaccaaacttggcatgcaagacgcgttgacctaagttaaagccgctatcttcaaatgcggcatgtgtcactgatggactaaaacgacctgctgcaggtggtcttgaaacctgtgttttaatacgaatttcttcgatacagtcttcaggcatttcacgtaaaaagcgtgatgggctgtggtatttttcttggccgtataaacggcgactttctgcatgactaatatacagtttttccatcgcgcgagtcataccgacataacataaacggcgctcttcttctaaacggccagactcttcattactttgttgagatgggaacatgccctcttcaacaccaaccataaataccagagggaattctaggccttttgctgagtgcagggtcatcatttgcacggcgtcttcgtgctcgtcagcttgaccttcgccagattctagagaggtatatgccaaaaagccctgtagtggcgagctgaactcttcatcttcagggagttcatattgaccacaagcactaataagctcttctaagttttctacccgggcacggcctttttcacctttttcagcttgatacattgccattaacccagaggtttgaatggcgtatttcgcttgttcttctaaagtgagatcgctgatcttatcttcgatatgctcaacaagctctaagaatttagtgacggcacttgcagctcggccagataagtgctgctgctcgataatagcttttgcggcataccaaagtggcaatgattcattgcgcgcgcaatcacgaatatggcttagtgttttatcacctatgccacgggctggggtgttaataacgcgctcgaaagctgcatcatcttgacggttacccactaaacgtagatacgaaagtgcatctttgatctcttgacgttcgaagaagcgcataccgccgtaaatacggtattttaaaccttcttgtagcattgcttcctcgagtacacgagattgcgcattgttacggtataaaatcgcggcatcttgtaatgcattacctgcatttagccagctacgcagtttgctgctgacaaagcgcgcttcgtctaattcattaaacgcagcgtaaacagaaataggctcaccatcattgccgtctgtccaaaggcttttgcccatgcgttcagcattgtttttgatcagcgcatttgaggctttcaagatggttgccgttgagcggtaattttgttcaaggcgaatggtttcggcttcgaagtcagttaaaaagcgtttgatattttcaatttttgcgccacgccagccatagatactttggtcatcatcacccacaatcataatactgttcgtattacccgcgagtagttttaaccaagcgtattggattgtattagtatcctgaaactcgtctactagcatgtgagcaaaacgctgttgatagtgacgtaaaagtgttgggtggtttttaagtacttcgtagcagcgtagcagaatttcggcaaagtcgaccaaacctgcgcgatcacaagcctcttgatatgcagcgtagactttcagcatcatctgctcattaatatcgtaggcttgaatgtctttaggacgtagaccttcatcttttttcgcgctgatataccaaccaaattgttttgctggccactttttatcatcgatgttcatcgctttaagcaagcgtttgatcatacgttgttgatcgtcagaatctaagatttgaaagctttcaggcaagttcgcttctcggtgatgggcgcgtaaaatgcggtgagataagccatggaaagtgccaatccacataccgccaaccggtgcttttaaggtttcttctacacgggtgcgcatttctttcgcggctttgttagtgaaggttaccgcaaagatgctgtatgcagaagcttgctcaacttgcatgagccatgcgatgcgatgaacaagtactcgagttttaccagaacctgcacctgcaagtactagcatgttttgcaatggggctgcgactgcatcccgttgtttatcatttaagccatcgagtaattcagaaacgtccatcgttacgccttttcaatctataatgggtggagtataacaggtgtttatgcaaggctaaataaaatactgtttttataaacagctattttggcaaatcattaaaattacgatatgaaaattgtgaatttgaccgatttttagcaaaaagaactaaaatcaaaataacgctactttttaacactttgatttgtaagtcataataagttggcataaagtgtgtttataaaaagtataatcattaaaaactacagaggttagtatggcagagcaaggttctggcggtaatgtaatcgcagcaatatgtaatatcttttttcctggtttaggacaattggtacaaggtcgtttaatggcggctattgcattctttttagcatgggtgattagtggtgcactaatatatgttgcagtaggttttattttactgcctatcgtatacctatgggcgattattgatgctgcacgcttcaaatcgcgactctagctattttaaatagcataaatacgagcgcccgcatgggcgctcgtgttgttttaaccttgcaaaactcgccacgtctagctgcaaacggtataattagcacataacgtattacgagtacccttcatggaatatcaatttatccgcgacccaattagcggtttacgcattaaaatttcctctgaacatgccgtcataggccgttggctaaatgaagaagtcggtaaagaaaaaatcgcgatggtgcaagcgttgatctctgcggttaagagcagcaatgagccattaactttacaaggtcaagaaattgatttgatcttgagtaaagatgaagcgttattcgaagcacatgcattacatcaagacaacgaagacctagttgcctatcaagatgatgatttaatgcttgaagaagaaggcctctgcagtggctgcggctttgaagactttgttgatttaattgaatcttggcaagagtttacacaaggccgataagcagaaacatgctctgcttatcggttgccaatttattgctcactcactgatttaacagcggctagtaataaatcttctgttaagcgtactttgtaatttgggttagcgtattgaaaatgaactaacccattcgtgtctatcacgaatactgcgggtactggtagcgcgactttcgcctcaccctctaacgagacaaagttaaccccaagcttattacggtaaatctttgctgttttgtcatctaaataaaacgctagacctaacgtttgcgccaaagtgaggctgtcgtcagaaagcaattgatagctaggagctgtaatttttgtttcagcgagtttttcagggctgtctggcgaaacggcaattaattgcgcgtttaaatctgctaattctttctcaattttttgtacgctagccaattgctttgaacaatatgggcaccaaccgccacgataaacaatcagcaccgtggttttttctttaaagcgttcagttaaagacactgttttgccgtattggtcttttaattcaatatttggcaccgttaatcctggtaataatggactgactcgctcagcagattcggcaatattggtcgcagttgcagcgataacttggcttgatagtacaaacaacgcgctaatgagtagagatttaaacatgggcttcctcggttatttttttcaactgcaaagatgacctgattgttgcgggattaatttcatctttacctacatcaaactcaaatttaactgtagtatataggcaaataaaaaatgcaagttgggataaagaatgtctgctaatttacaaaaactcgttgttatgctcgagatgcaaaatgcgatgaataccaaagttcatgagcaatggtttagccaaggttttgaatggtatcgtgcaatttgggttgagtgtgctgaaatgcttgaccactacggttggaagtggtggaaaaaacaaaccccagatactgaacaagttattttagagttagttgatattttccattttggtttatctttacgtattgatggtgaaaccagctatgagcagttagctgcgcaacttgaagctgagttaagtgcgccagttcaagctgatgactttaaacaaacactcgaattattagccgcgtcagcagtcgctgaaaagagttttaatgcagctgcatttgcaggttgtatggcgcaaattggtatggatattgatgatttataccgtggttatgttggtaaaaataccttgaacttcttccgccaagatcatggttacaaagacggtagttatatcaaagtctggaatggccaagaagataacgagcacttagtagaagtggtaaaaagcctagatacagagcatgcagattttgcaaaacttgtatatcaaggcttagagcagcgttacccgaagtaattatttaacgggtataaactcgcgaaaatcgatggtcgataaaaagccatcgaactgcttatgcggttgctgactatcagggttggcaaccgcaagtatatggccaataccaaactcttttgccgcatctagcacggcagggctatcatcgacaaataaagtccgttccttatcaaactgccattcttgatgtacttgttgccacaatggttgatgctctttactcacgccatattggtgagttgagataaccccatctaagtaattatcgatagccgtgtgttcaaactttaacatggcacaatctgggtgcgcgttagtaagcatgatcaattgcttgcctgcttttcttagctccgttaagaacggcggaacatcgtcacgaattctgattaaatgttgaatttcacgttttaacgccataatcggtaaatcaagttgctgttgccagtaatctaagcagtaccaattaatttgcccgtgaacttgttgataacgatgtaaaatgtcagcttttgcttggtctaaactgattttatgtttacgcgcatattgctcgggaataacggttagccaaaagtaattatcaaaatgcaaatcgagtagggtgccatccatatctaacaacacagtatcgatttttgaccaatttaacataggcaattcactttaaaagatttatgatgagcataactgccatgatagcaaattaatgccaatgacacagaaaaagcatcctacaccaccgcaaattttgtctaatgaagttgtcgctaaaagtcgactatttactgttgagtctctcgaattgaagttctctaatgacgagcaaaggcaatacgaaagaattcgtggcggtggcagaggggcagtgatgattgtgccagtaacggccgataatgaactgctattagtgcgagagtattgtgcaggcaccaatgattatcagttgggcttcccaaagggcttaattgaccccggcgaaacaccacagcaagctgcagatcgtgagcttaaagaagaagttggttttggcgcgaagcactttgctgaacttaaaaaagtcagcatggcaccgagttactttaatgccactatgcatattttgtacgccgaagatctctaccctgaaaccttacctggtgatgagcctgaaccgcttgtcgttgtgaaatggccaataagtgattggcaatcattattgcaacaagaagactttaccgaagcacgaagtgtcgcagctttgctattattaacaaagtacttagagtcgggagcgggcaatgaataattttttagagccgtgtattcggttagctgaacaagctggcgacgctataatggccatttatcaacaggatgatataggtgctgagcaaaagtcagatgatacgcctgttactaaagctgatttagcctcgaatgaggtgttgatggcaggtttacaagcattagcgcctgatattccaattatgtcagaagaaacacctattccagcgctggcagatagaaaagattggcagcgttattggttacttgatccaatggatggcactggcgagtttattttagaaagtggtgattttgcagtaaatatcgctttagttgaaaataatcgcccagtgcttggcgttattcattggccagcgaaacaagtgacttattttgctagttatcaaaatggcgcgtttaaacgtgaaaatggccaagatcagcaaatttcggtagcaacgccggataatttaaccttagctgtaagccgaagacaaaaaattgaagctgttagccaatatttaaatacccagtttgcgacggttgcattaggttcttgttcattaaaagcatgcattatcgcggaaggtaaagctgattgttttttacgaatagggccaacaggtgagtgggatacaggcgcgtcgcaagtcattgttgaagaagcgggtggttgcatcacggacgctgaattcaatccgttaacttacaatcaacgagaaagtaccgagaatcctgattttattgttatggggcaccctgattgggagtggcaaaaaatgattagtccacatcagcgcgcattttagtgaggttttgtgtgctttttgttcgcttaagcccgtattttgattataacgcttgatttctaattttattgctatattatagcgctctcttcggaacaaggcatcgttaacatgctcatgttacttagagattacaggcgcgggatagagcagaatgataaatcattcgtcggactcgctaatacctgaagtcgaaggtcgtcggtttaaatccggcttctgggactctaaacatacaggcgcgggatggagcagcctggtagctcgtcgggctcataacccgaaggtcgtcggttcaaatccggctcccgcaaccaattatttgaattggctgacttcttaaattaagtgagaagtaaaataaacttaataatttcaggcgcgggatggagcagcctggtagctcgtcgggctcataacccgaaggtcgtcggttcaaatccggctcccgcaaccaatttttaaaaagattggtgcaatgttggaactataaaggtcgtcgtcacggcgtgaggcattcactcttcaccttcacagctcccgcaaccaattatttgaattggctgacttcttaaattaagtgagaagtaaaataaacttaataatttcaggcgcgggatggagcagcctggtagctcgtcgggctcataacccgaaggtcgtcggttcaaatccggctcccgcaaccaactgaaattaaaaaattgatatgtaatactagacacgctgtagcgtgtttttttatgcctgaaattcaggctcacaacccgaaggtcgtcggttcgccctcaaaactcacagctcccgcaaccaactgaaattaaaaattaatatgtaatactagacacgcaaaagcgtgtttttttatgtctgaaattcaggttcagagcccgaaggtcgtcggttcgccctcaaaactcacagctcccgcaaccaactgaaattatataataggcacgcgaaagcgtgtttttttatgcctgaaattcaggttcagagcccgaaggtcgtcggttcgccctcaaaactcacagctcccgcaaccaactgaaattaaaaaattaatatgtaatactagacacgctatagcgtgttttttatgtctgaaattcaggctcacaacccgaaggtcgtcggttcgccctcaaaactcacagctcccgcaaccaactgaaattaaaaaattaatatgtaatactagacacgctatagcgtgtttttttgtgcctgcaaaaagttgctttgcatcaactgctaatgttaaatccttctaacaccttcctgatagcttgatatccacccgtaaattgagaaatgctttataaaaatcaacttaatttatatgtattagcttttagtaataaattatcataataaaaaataaaagaagtgttttttacttatttttcattctttttgtcgtaatttacttacatatcagaactgactgaactaatcttaaagtatggctttaggctgtaccttgataggatctcttgtgtaagtatttgacgggcaaacatggctagataacagctatggttaaagcatcactgagatcctaacctcttacagttcagctttccttcctttgagttttggcagctgagtattcagttgcttttctttactatgctagtggcttagtgcgagtaatgaatcttcgcttaaaagatagaaaggtttatgttacaacgtcagtaatattactttttagctacaaacatgactgaactttaccattggtttgatttatttggcgtagccgtgtttgcggtctcagggacgctactggcatatgataaaaagatggatggctttggtgttgtcgtattagccactgttactgcaattggcggcggcacagtccgcgacgttattttagacattcctgttttttggctacatgatcaaagctacttttgggctattttactctcggtatttatcactacgcgtctaataaacaaacagcgctctatttcgctaagtgcactacagattgcagatgcatttggactcgcgttttttgctgttatgggggctcaaaaagcaatgcttgccggtatgccagatacgacttcgattattatgggggttatcacggcatgttttggcggagtcattcgcgatgtattagcaggcaacatacccatgctgttaaaaggcgagctgtatgcgataacatgtatcgccggtggtattgtttacacagtaagtatttccctaggtttagtcactgagcttgccatgattatggcaatgttaatgacactgatgcttcgcttagctgcaatgaggtggcatttaacgttgcatgtttttaaatatcctgactaaactgtattcatggatgaactatagggacatatcggatcgtgtctttagcccgaattttttctcgtgctcaggttggcgtgcaagctcctgaagtgattgttgaagtgcatttaggtaatggattgccagcgtttcatattgttggtcttcctgaggcctcagtaaaagaagccaaagaccgtgtacgtagcgcgctcgaaaactcgcagtttggctttcctgatcaacgtataaccgttaatcttgcgcccgctgatttaccaaaagatggcgggcgatttgacttagccatagcagtagggattctagtcgcttctggacagatcacctgcaacgacatacatcgttatgaattttatggtgaacttgccttaaacggtgaagtaagaggtgtgaatgctatcttaccttcagtgttgggtgctaaagagcaagggcgctgttgctttttacctgtcgaaaacgataacttagctagtttagtttctggcgtatcacgaaaagcggtttattcattacaagatgtctggaacgacttactaaatcaacaacctctgcctttgaatatccactacccagagcagcagccaaaccgagagtcgctacttgatctaagtgatgtgaaagggcagcccggcgcaaaaagagtgttagaaatcgctgccgctggtggacataacttactttttcttggcccccctggtacaggaaaatcaatgctcgcacagcgtatgccgacgattatgcccaccatgtctgacgaagaagccattagtaccgcagcattgtattcgattataggtcaatcggtagatctatcaaattggcgagagcgaccatttcgaaatccacaccacacttgctctgcggtagcgctggtgggagggtcgtcaaatccgaagccaggtgaaatatcattggcacacaatggcgtgttgtttttagatgaattacctgaatttgagcgtaaagttctcgactcactgcgtgaaccaatggaaacaggtgtagtgacaatatctcgagcggcaaggcaaatggagttcccatcgcagtttcagctaatcgccgcattaaatcctagcccgacagggagtcataccgataaacgtgcaacgccagaccaagtcttgcgatacttatctcgggtgtctgggccatttatcgataggattgatttgcaaatagagttaccgcggcttacaagtagccaattgcagagcacccaagcagaagaaagcagtgatcaagtgcgtcagcgtgtagagcgcgcgtatgctatacagcttaatcggcagggtaaggtgaatgccaggttaagtaatagagaaatggcgcgctattgtgagctaggagcagctgagttgcagtttttggctaaagccagtgagaaactggcgctatcaccgcgttcttatcatcgtattatcaaagtggcccgaactttaagcgacttaaaagcccagccaacaattaccttaaatgaattaaaagaggcgctaaattaccgtgcgtttgaacgactaataagtcagttaacgcagtactagaaaacgaattagattgaaagcatgtagcctttaccgcgcacggtgacaatgcgtttttgatctttttcatcgctgagctttttacgaaggcgaccaattaatacatcaacggtacgatcgcttggactccaatcaggctggccaatttcttcggaaatcttttctcttgatgtggctttacctgcattaccgattaagcagattaaaactttatgttctgcttcagtcaggcgtgactcttcgccgctgggtgtgatcagcgtgcgattatcagggtgtaatttaaagttggcgtactcaataaactcttcgctttcgtcgtttgtttgagagctcttaaggcgtttatacagtgcgcgcattctaagttctagctcgagtaaatccactggtttgcaaatataatcatcggccccttgcgcaaggcctgcgatacggtcagcttgcgaatctcggcttgataaaacaatgaccccaatatcagtcagagcatttagttctttggcaagcaataacccatcgcgcttaggtagcacaatgtcgataactgctaaagaaatagcttgtgaagaagctgcacgagattgcactatgctcaatgcatcagcacctgttgaatctatctcaatgttaaactcagtttctttaaagtggttaagaatgcgtttaacgagcagttcgtcgtcttcaaccaataaaacttgaatagtcattcgctttaatttcacacttgatttgttgttatgttagcactgtatggcgaaggctgagaagtgtaatggcgaggtttgtaactatttcttacaatttaatggcttagcgatagttgaaaagggtgaaagctgagcactcgtgcagtgctcagccaagcgattaaactatttttcaggataaagatattgccaccactgcggctgatcttttaagtttttatcgaaatacgccagcatggtgttccaccagtcaaagcgtttatcacgcgcaaaaatttggtgatctgctcctttgtattcgattaggtcaacatctttaccgagtagctttaatgccgtgtacatgttgtgactttcaccaaccggtacgttggtatctgaatcaccatgaaggagtaatagcggcgttgttactttatcagcatgaaacaccggactatgttggctataaagtgtagggttgttccaagggtagctattttttgatgcctcagctgaatataaataaccccaccaaccttgaccccagtacgaggtgatatttgagatccccgcatgagctatagatgcactgaacatatcagttttagttgctagtagcatggtcatgaagccaccgtaagacgcgcccaagttgccaacacgcttactatctacatagctatatttatccaaaaaggcttttgtgccgtcaataatgtcattagctgtgtactcaccccatgcatttacatgtttagccgaaaactcttggccaaagccagtcgcacctgttggttgtattacgtaaacaacatagccgtgctctgcccataagttaaatgggtaacgacctgtgaagccacgtgttactggtgatgtgccaccgtaataataaaccagtgcagggtattgttttttgctatctaaatcatgaggtaaataaacacgaccctttatttcaatgccatctttattagtgaagttaaattcttcaagtgaggctacttgggtattttcatagccaattggctttgaatcccacacgactttagcacggctcttgcctaagttgagctgcttaagttgctgtggtgttgacgctgtagtgccagtcactaaaatgcttggattgcgctcgtttgagtaactaaattgctcaacaacatcaaagcctgtatttactttattgaaacgctttttgcttaagtcgtattgataaagttgtacggtatcttgctcggtgactttaataagtgcatcaccgttttctagtacatttaactggccgatagccgggttaaactctttacttaaagcggttgcttttttaccgtcgcggctgagtaaataaagttgaccatcatagttattagccagcatgccttcaggaaggtttcggcctaagccattattaaaatctgggccagcagtgacataaataccgtcatcagtatatttagcctgattaaaggtattaaattgaccaagcaccgtgatagccgatgtagctaggtttagctcaacaagctctgttgcaggctgtggtgatagctgcattgcttgtgctgagcgactcattaatacgtgaccgtttttggcatcaaaatcttcaagtgaatggctaagtgggccttggcttaaaattttgctaagacctgttgtgatatcaagcaagtatatttgtgacgttgtacgagcataagaccaacggtcttgcaggccttgataatgtttagtgagcttgccattgtctgttggtgattttgaccagctaaaaattaagctgttgttatcaaaatattgaaagccacttgcaccagaaaggtttttagcaatcacgctaagttgcatcgtttttagatttaaacgcttaagctcaccatttaatagatacactaaatttgtgctatcagggctccaagtaatattgctcggttgggctgactcaaagcgataaagagtattgttttttgcgtctttaagctcagtcacgtattgcgcttgattagccgttgcatcttcgtaatgacgttggctagtaatgaagtattcaccatttggcgccattgaaatataacttaccgttggcgcatcgaataactgttttgcagacaaaccgtgttgttgtttagcgctaaattgcacagtatctagttctgacttagccttaaaatcaagctcaacctcattccagtttgcaacttgctcagtgatgataacaaattggtgatcgccttggcttaaagctaactcatagctgttatttttttctgtttgcttttcaccatcgataaacagctgtgcgttttcaatgcctttaagggtcaacgagccttggctaaagcgctcggttgatgcagtaaattttagtgcttgcaggccacctaatgtaagggcgcttactttgtcgaatgattgccactttatctcgtcgccaaaaatacgaatattgtcgttatttttttgtaagcttggtactaagttggcaataatagcgtcacgatgttcggtttgataaggctttaattgcatatcatcgctaagagggccaataaactgaattgctgaacgttcaatagcatctgccatagctgttgaacttagagaacaaagtacaagtgcgctaagcgtggtttttagctgagtttttttgttcagccaagtggttgtaaatgtcatagtttcgcctgttgaaggtaagttttagcaatatagcacgcagaaaaactagcaaaaagagctctgcgttagaatgctgatgggtttgaggttccagttatctgttgatatggtgggcgcttagatgaacaatgaggatgcacagtgacacttttacttgtttatatgttggttgctattaccgtctcttttttatgctcggtaatggaagcggtgttattaagtataacgccaagctatgttgctatgttaaggaagcagcaacctgcattagcaaaacgcgttgctaagctaaaagataatatagaccaaccgctcgcggctattttaacgcttaatacaattgcgcacacagctggtgctgcaggtgttggtgcacaagctgcagtggttttttcagatgctgctgttggaatagcctcggcaattatgaccttattggttcttgtactttctgaaatcattccgaaaacactgggtgcaaattattggcgtggtctaacacctatcgtcagcattagccttatttggttggtggtcattttaaaacctttcgtttggtttgcagatatcctcacgcgctttttggggcgtaattatgatgaggcctactatattcgccaagaaattgaagccatggctgatataggcacagagtcaggggcacttggtcacgacgaatctgagattattaggagtctgctgcgttttcgccacgctaagctagataccataatgacgccgcgtactgtgctgtttaaagtgcataaagatttaactgttaatcagtatttgtctgaacatggctcatcgtcattctctcgggtgctggtatatgacaaaaatggtgatgatattatcggctttgtacataaaaacgatattatgctggcgtatcatcgtttaggtgaagactataagataagtaagctggttaaaccaatttatacagtgccagagaccctgcatgtgccaacgctacttgaaaccttattgtcaggtcgaacccatatttgtttagtggttgatgagtacggagatgttcaagggattgtgaccttagaagatttaattgaggcgctgatggggcttgagattgttgatgaacatgaccaatctgcaaatatgcaaaaagtggctaagcagcgttggcgacagcgcttagcacgaagtaataccattgttagtgatgacaaacgggagccttagcgacgctgcccggtcgctgttttgaccatttgccgccatgagattgaccaatttaaaaaatcttctttggctttcgggcggcataacaaaaagccttgcattaagataaattctttatagcggtctaagtattcgagttcttctactcgctcgatcccctcggcgacaataaataaatcttcttgaatagcaatattcacaagactactgacaatgacttgagaaaattggtcagtttcaatattactgatcagcgttttatctattttaatctcggtaaatggtaaggttttcaattgttgtatgttggtaaagccggtgccaaagtcatcaagagaaataccaaatcctcgcattcttaatctgtttagtgattctaactgtgctgcggtgcgtaaggcgtattgctcggttatttctaaaataacttcacctggggtgaggttatttaaatgtaatattagtgccaatttatctgggcagcttaagtcttcgagttgcgaaggcgataaattaaaagccagttttaggttagggtgaaaatgttctttgatttcagcaaagtcgttggtcgctttttcaaagagctgaaaggtaataaggttaattaaatctaaatcctcggcaacacaaataaatcgctcaggtagaattatttcctcttctttacttgtatttattcgcgctaatacctcaatactttcgacacggttatcgtggcggttaattttgggttggtaaaatggaattatttcgttgtgactaatcgcatgaagtaacagcgactcagaaataggggattttgtccgctctacgtgaaatgaaaaatgctcaagtttttgcagcaacaaataaacctgattcaactgcacgggcttagatatattaccaatcagatgggcattatttttacgggcaatatcagctgctaaatcaattactttgggatccatttcagaaatgatcgcaatagcaccatggtatttcattgcgcctaaatgacggatcaattccataccatccatatcgggcatttttagatcagtaaagatagcatcaaagaagtgaggcgctttttttactttttctagagcttcttctgcacttaggcaggtagtgacatggctaatttccagctcattcaaaatagcctgcataacaataagaatcgctttggagtcatcgactacgagaatatgcctatttgacttcactatattcactccttgaacgagaacactatacttaaaagtagtagataaatattagttagtcatgttttttggttgtttgtgtgctgggaagagtaatttaaattgtagaagcctctctctcgtaatttattttgtcctacgtataatagccgcactcttatctagtatttttacagattatggcaagacttcagttgagcttagcaaatgaaaccttcactttgcatttgcacggctcgcaattaatacagttattccatcaacagcaagctattgcatttgataacccgactcagaataagtatgaatttgattttcaaggacaaaaaattagcttagataccagcaaagtgcatgaaaaaagcttagctatttatgttaatcagcaattagttagtgaacttgcacttcctgcggtagaagacgctgaaccaaaacgcggcatcattggcctgctagcactgggctttaaattatttaaaagtgcaaaagtagtgaaagctgctttagcgggtgcatcagttgctggttacgcatggcttttttctattgaatttgctttgatgttaattgcttgcttggttgtgcatgaatatggtcatgtgcgcgctatgaaatattttggcattaaaactaaaggtatttatcttattccgtttgtcggtggcttggccgtttccgacgataaaattaccacccgttggcaagacgtggtgatctctctaatggggcctgcatttggcttaattacctcagtactcggagtggtgctttactacgccactgaaatggaaatattcgccggtgtggcagtactcagtgcactgttaaacctatttaacttgttacctattttgcctttagatggcggtcatgtactaaaaagcattagtttttctatgcgttcttgggtcggcttaagcgtgtgcttattaggcgtgttatttggtttatggctgagctatacctttggtttaatgctcctcgtgttcttcttgtttgttggcgcgcttgaaattgtatttgaatggcgtggtcgtcattattcacacctaatccctcttgatacttacgggcaaggtttttcagcggtcatgtacgcattggttgttgcaggccacgttgcggtgatgatgcattttgctgattcagaaagcgcaatccttagcttgccaatgaagattttatcgagctaagaattgcatattaagcactgagtgggctaaaactcagtgcttttgcattcgtactaaggataaaagctcagcattaacgatataaacacgccggtgatgatcagctgcacaaggcaaaagcccatgatgtcttttgcttttaagccggcaatagcaagcacgggaagtgcccagaacggctgaattaggttagtccaggcatcgccccatgcgacagccatagcaacacgtggcatatcagcgccaagtgtttgtgctgcaggaatgacaatcggcgcttgcactgcccattggccgccgcctgatggcacaaagatattcacaaacccggcacttaaaaaactccaaaaaggcagcgtttcggctgttgcaatggcaataaatccttcagagacttgttgagcaagtcccgtttttaccataatcgccatgatcccggcataaaacggaaattgaatcacaataccagcgccgctggggattgcttgctgtaagcttcggagtaaattatgtggtgtttgatgcagtaaaattgcgctaaataagaaaatagcgatcacactatttaaatttaagccgcctccgcttagcacaaaataatagaataaataggcaaggccaacggcacctatccccattcctaataaacgactatgctctattacttcggcagggcgggtaggtgttgctatttgcttagtttcatcatcaagctttgcggggtcaacatagacgctgtctttctcgtttggcagcatgtagcgatttaccagcggcatgataataaacaagcccacaacaatagcgatattaaatgccgaaaagatcgtgttttcggtgccaattacaccaatactttgctctgcaaagtggccgtcggtcgcgattgtcagcggcactgaaccggctaagccgccatgccaaacaataaagcctgaataggcactggcaaccaataaacggtaatcaacacgggtttgttttgcaattgctttggcgaacaaagcgcctatgactaagccaaagccccagtttagccagctcgctaataaagaaacgagcgtcacgagtataattgctttggctggggtatttgctagtgttgcaagtttattgagtatgctgcgcatgactggagtactcgctaacatgtagcctgtaagcagtactagcagcatttgcatagcaaattgtaataggttccaaaatccaccaccccaagccgcgagcacttgtgtgggcgttgacggtgtaaagagactcgcaacgataaagctcagcaaggtgagtaatataacaaatacaaacgggtcgggtaggtaacgctctactagtttagtgaatggtttggcaacgcgatttagcatagtttttattgttgtcgtcgaatcgataaagccaataaatcatgaataacgatgattggcaaattgcgacgtcgttgctttagcttatattaataaaacaaatgttaaaaacgattactgagcatcttgttctagcacggcttttaagcgggcttgtacttcttccactaacaaaattggctggaactttgataaaaaggcattacaaccaaccttctcaaccagggcttggttaaagctaccactgagtgatgtgttaagcacgatgtgtaagttcttcattcggctgtcgttgcgaatttcgtgggttaaacggtagccatccattgctggcatttctgcatcggtgatcaccataagtaattctttttcgacatctttgccctgatcagcccagccttttaacatttcgagtgcttcgagtccgttacgagcaggaataatttcgatgccgagttgcgataaagtatcgcttacttgtttgcgagccgttggtgaatcatcagcatgaagaattttgcggcctgcaaattcgttcacgatactcttatcaagaatatcttcagaaatatgtacttcgtactcaacgatttcggcgagcactttttctacatcgattatttcaaccagttgctcttggccatcgcgtttcaccttcgttaaggctgttagataatgatttttaccaatcgcagttggtggcggcataatatcagaccatgtcatattaatgatttgatcaaccttgccaattaaaaagccttgtacggtacgattgtattcagtgataacgaggtttgtatcttcaatgtgtttagcttcaggcatgttaatcgctctccgtaaatcaatcacaggaattgactcaccgcgaatatcaactacacctgacactttcgggtgtgcgtgaggaattttgctgatatgaggcagtttaacgacttcttttactttaaaaacattaagagcaaataagtggcgactgtggaggtaaaatagtaaaagctctaagcggttttcaccgactagttgcgtacgcttatcaactgaagcaagaacacctgacatatttcacccaaaacaactaatacagagatattatagtctactattatttttcatcgacatgcattagtaatttcaatctgttgccaaagagcaagcattccagtaccgtatcgttaatttccaccactgtaaattgcaaggattatgcactatttattaaatcgtatagtggtacttatccgcagtcatattgatcaagtaagttggcaggctgtggtggttaccacgcttttgcatatgctacttatatggtggctgcttatgcttgcaggagagcaagctttaacaccactaagtacctacgtttattattatgttgtaacaacatcaacagttggctatggcgattttagtgccagtactgagcttggccgctggattgttgcattactacaaataccttttggtttagcattatttggcgttctgttaggaaaaacagggcaaacagtaacttatttaatcaggcgcgctatgacgggtgataaaagcttcgcacatataaacaatcacattattatttttggttggcacgatactcgtactaagaagatggttgactatattctagccgatcaaaaacgcttagatcgtcgtattctattggcagttactgaacaaatggagcatccatttttaacaaatccgatggttgattttgcacgcctaagtagctttaccgacttagatgagttgcaaagaatcgcaattgaacgcgccgataaaattattattgatggccaagatgatgaccaaacgtttactactgcactgcgcataagtaagttggtaaataaggattgtcatattagcgcgcattttactgacgaaaccaaaatcgaaatgctacatgagctctgtcataatgttgaatgcagtagtgccaagtcagccgaaatcttagtgcgttcaatgcaagatccaggttcgagccgtgtgcaagaagagttgttatcaacacttcatggtgatactcagtttagtttgcctattccaaaaggcgtgcaagcaatggagtttggcaagctgtttcatcactttaaatacagccacgatgctatattactgggtgtcgcacataatttaagtgcaaaaaacatggatttaaatccgccacttgactatgtagtcagtgaaggagatattttgcattatattgctgcggagcgtgttttgagtgacgaagttgattggtcagcgttggtatagtaccaatccgcaataatacttttaattaagcgaattggtatttatgaatgaagttgcgtttttaattattgttttgagtgcctacattttacctgtggtcattgtgctcaatagtaaacgtactcaaggccacgaaaagaatgcttggttaattggtatcattttcttttcgtggttagctctggtgatgtatttaactattgtccctaaacacgggcgggtcaaaaaacaccgtaaaataaaaacgaagggttaacttacagctactgtctcacttcaactgtttcaatttatgatctatcaatgggtcatcaggtgaaagttgctgcgccacctctaaaatctttattgcatcgtttgggtgttcatcctgatgcttgattgcgacatcaatcagcggctgaacatcaattgtgccattttgctcttgaatatgctctgctttttcttcagtcaaaattgtgtgcgccttactaagtaaggctaagcggtgtgccgaaccgttgttggctttattgagccgacgataatagtcttctttaaaacgtaacgtttttgtctgctgtcgaaattgagcaatatcgacttgctggtggctaataaaatcaacagcaacatctttataaaaaccaaatttattcaagtatgtagcatgaacgctgtggcccataccgaacacccgtaaatgggtgagttgtgggtagcgtttagcatgagctcggtcgatacgattggttggatcgtagatgatatagcctttagcatgacctaggtctaaatcgtgataatcaccgttccagtcaaatttttgtgcgatatctgtgcttgagcggtcatcccatggggctttgtttttattttttgtgctgacaggatgaaataacaagactttatcaagctttaatagattggcaaatgcgccaacagcaaagccgccacgactcaagccatatcctaatcgttctttaaatccgccaatcaatggcgctaactgctcaataaaaaacaataggttgcggtgtctaaaccagttactaatgcctaaatgttggaaggcaattacattcacattttgttttttcgcaagtttataggcccaaggcgaaaaatcatctgtgagatcatgttcttggtagttggttcccgctggtgagaaggtgaatagcagaggtttatttgcgtcgatgatatggtacttcacatatacatcaccgagtaagtcaccaccggtaaatgggactcggctttgttgttgctcatgtgggagatgggtccactcatctaaccaatataataatttcatacatcccccaagatacctctaaaataaagggacagaattatagcaaaaatcactactcattaaaaatgcacgcctttttaatgtgttatgtttcgctcatagctataatctgttgccaatcatgttcagttactggcattacagataatcgaccgccttttttaagggctatttcggtaatggactcattggctttaattgcttgtaggctaacaagctttttaaggtgagatttataagtaacatcgaccacaaaccagcgcgggttatcagtagttgctttagcatcgtagtaatcgctatttaaatcaaactgagttgggtcggcataggcttcacgactgaccgtggctattcctgcgacacctacatgtttacaacttgaatgataaatcattaccaagtcgccttgtttaatgccatcgcgtagaaagtttcgcgcttgataattgcgcacgccatcccacatagaggtttgcataggtgcgttttttaaatcatcaattgaaaatgcatcaggttcggttttaaaaagccaataagccataatggggtgctcttacaaagatttacttccaattagtctatagtatcattaaacgcttgtcgggattgaggataaataaatgagccaagtattagatgacttactgtcattaatgtcgttagaagagattgagcaaggcttgtatcgcgggcaaagccaagatttagggtttagagctgttttcggtggccaagtaatggggcaagccttgtcggcagcaaaagaaacattacctgaagggcgtatagttcattcactgcattcttattttttacgtccaggtgatgcgagcaaaccaatcgtttacgatgtagaaaatattcgtgatggtaagagctttagtacccgccgtgtaaaagctattcagtatggtaagccgattttttacatgactgcttcgtttcaaggtgaagaggacggcttatcacaccaagcgcagatgcccgatgtcccacagcctgaagaattaaagtcatcgcttgagttttatcaagcgaatgctgaacttattcctgaaccaattcgcaataagtttattcgtgaagtgccaattgaaatgcgtccagtgacctttcataacccatttaaaccacaagcaatggaacccgttaagcatatttggtttaaagccaatggtgagatgcctgacgatcagcgtattcataattacttacttgcttatgcgtctgactttgagtttttaccaacggcattacagccgcacggtgtatcgtttatgcagccgaatatgcaggttgcgacgattgaccatgcaatgtggtttcaccgcccgtttagactagacgattggattttatattcgattgatagcccaagtgcgagctctggccgtggtttggtgcgaggtcagttctttgaccgtcaaggcaatttggttgcctcaacgatccaagaaggggtcatgcgtcagcgttaatcttttgcgggctgagcttggctttgcactatatcgtcaattgactgccagactcgtgctggcagcaatgccttcagatataaatacacttcacacagctcattgctacccgttaagccttgctctgattcggtaattagcttttgctctcgcaagcttgagataaaaccaataagtacttttttgtcaaagaactccggcgttttaatgccgtgcaaggtacctaagcgctctgctaacacttggctttcgtgctcaagctcttcacgctcaataccgctactggtttgaataaaaccaaccacgatagcataacgctgtagcgttaagcttaaggcgcgaccaagcatttcgagttttgctaagcagtcattgctattggtgattttgatattatcaccttcaatttcaataaggtcttgatcaacaaagcttgcgagcacgcgagtaatgtagttttcatctagctcatgcaagaaccactctttagcgaacagcgggtaaaaacgtgcaatcaaggcatggcaatctgccatggtagtttgatgtgctttgaataaatgcagcgcaagcaagcttggtacagcaaataagtgcaatacgttattacggtagtagttgaatagtgttttttctttatcgttaatcgcgataatttcgccaaactcatcactgatgacgtcaaatttattaagcttaagtgcatgctctaatagctgttcagcactttcgttaggtgttgttaccttgtcgctgtaacttgcgctgcgttgtaaatgtagataaaactcaagttgcgcaatcaacttaggcttacttaacgcatgtttgtcattcaccaataaaatcatcgcgagtagattcaccgcattgagtgcagcggcactattaatattaaccattactttatcggcaagattcgctacctgcggtccaagccattgtggcttttgtacatcggttgggtgaatagactcgcgccaatcaggttgttgatcattgaggtattggtttatcgatatagggtcgccaaagtttaaataaccacgaccatagtttttcaggtttttaatggctttaaaaatccccaagaccgactcaccttttttatcgttaccggccagctcttttaagtaagtattaatttccattacgtgctcataaccgatgtatacaggcacaatcgaaatagggcgatctataccacgaagcatggcttgcaacgtcatggcgagcatacctgtttttggtggtaacaaacgaccagtacggctacggccaccttcagtgtaaaacttcactgagtagcctttaataaataactggctcaggtactctttaaatactgatgaatataacttgttgcccgcgaatgagcggcgaataaagaaagcaccactacgacggaaaataccacctgccgggaagaagtttaagttgataccagcggctatatgcggtggtactaaacctaagtgataaatagagtaggtcagtaataagtaatccatgtgcgagcggtgacaaggcatataaataatttcatggcctttatcagtgagctcgtgaacttgctctgaaaacttaatgtcgatgccgttataaagtttattccacagccaagttaatacacggtcagcaacacgaatggtggcatcgctgtaattggcggcaatctcatcaagtagtttcagcgcattttgacgagcttgctcttggctgatgtttttttcttttgcttctatttgaatcgctttttttattgttggtgatgcaagtagcgaattaaaaagctgttcacgcgatggcatttttggccctgtagcagccagtttttgacggcgaaagtgcacacgagctacgcgtattaacttatgtggtagctcatcaacatcggctttttcattgactaataaagataagtcgagtggttggctaaatcgaataaagttatcacgcccagaaaatagcaatacaaagaacttgcgaaaccagctgggtgttaatgaatgagacaccaaagtacctaaaccaggcttttcttttcctgggttacgaccccataaaatggtcaccgggatcacttggacgttttgctcaccagattgcattaggtggtcaataatgtgtttgccttgctgcaaggcattacttggtttgcttttattaccaaatagcggtggtgggttttgaataccaataaagcggttaagttcggcattacctaataactgctcttcggttgggtcaggtaagccatattttttacatacccgcgccagtgccgctaaatcagagcgcgcattcagcctcacaatataaaaagttgggttggcagggtttagattgtattgttcaatagggttctcaggcagaactttgctttttactagcaagcggttcatcccagcagaaatagcatttaaacaacgattaatgatacgcatcaactcaccaaagttttataccaactaggtttagtgcctaagacagctcactttattaagccaattggtattagtaaatatacagtagaccacatgcggtcaaaataagcggcatagaataacaattattaactggactgaccattgcaacattgtatggctttttgtttctttacccaactatagtaagcaaagacataccttggctgaatttagttctatttcatttaaatttcattttgataaggcgtcgagtgtattaattctaaaaagttgttgcatttatcaccaatataactataatacgcaggctttcaaaattccctcgggaacttggaaggaaagattaagcttggatttcaagctaataaacaggaattccgatttggaattcaacgtagatataagagaacagccgacatcttagttagtaagattgtttcggtcgtttttttatgctctttttaaatgctctttatattgaggtttaagaatgtcaaatcaacgcattcgtattcgcctaaaagcttttgaccaccgtttgattgaccaatcaacggcggaaatcgtggaaactgcgaaacgcactggcgctcaagtacgtggtccaattccactacctacacgctttgaacgttttactgtactaacttcaccgcacgttaacaaagacgcgcgtgatcagtacgaaatccgcacccataaacgtctgatcgacatcgtagaaccaactgacaagactgttgacgctcttatgcgtttagatcttgctgctggtgttgatgttcaaatcagcctgggttaatcggaagattagagaggttttaggaaaatggcattaggtctagtcggtcgtaaagtgggtatgacacgtatcttcactgaagatggtgtatctatccctgtgacagttatcgaagcgactcctaaccgcattgcacagatcaaatctgacgcaacagacggttataacgcgcttcaagtaaccgcaggcactaaaaaagcaagccgtgtaaacaaagcagcagcgggtcacttcgctaaagctggtgttgaagcgggtcgcggtctgtgggaattccgcctaaatggtggtgaaggcgattttgaagtaggcgctgagcttactgttgaattattcaacgaaatcaacaaagttgacgtaaccggtacttctaaaggtaaaggtttccaaggtggtgttaagcgctggaacttcagcatgcaagacgctactcacggtaactctctatctcaccgtgctcctggttcaatcggtcaaaaccaatcacctggtaaggtgtttaaaggtaagaaaatggccggtcacatgggtgctgagcgtgtaacgactcaaaacttagaactagttcgcgttgacgctgagcgtaacttgcttttagttaaaggtgcagtacctggcgctatcggcggtgacgttatcgttaaaccagctgttaaagcataagtcctggagatttagtgatggaattagcaattaaagacgcttctggcgctcttgaagtttctgaagctacttttggacgtgagtttaacgaagcattagtacaccaagtagttgttgcttacgcagcaggtgctcgtcaaggtactcgtgctcagaagacacgttctgaagttagcggtggtggtaaaaaaccatggtctcaaaaaggtactggccgtgcacgtgctggtacaattcgtagcccaatttggcgttcaggtggcgttagcttcgcagctaaaccacaagatcatagccaaaaagtaaaccgtaaaatgtaccgcggtgcgatcaaaagcatcttatctgaattagttcgtcaagagcgtttaatcgttgttgaacagtttggtcttgaagcaccaaaaactaaagaactagttgctaagcttaaagaacttgagcttaaagatgttctaatcgtgactgaagaagtagatgagaatcttttcttatcggcacgtaacctatacaaggttgacacgcgtgatgtagctggtatcgatcctgtaagcctaatcgctttcgataaggtacttattacagctgctgctgttaagcaacttgaggaggcgctagcatgatccgtgaagaacgtcttttaaaagtgatccttgctccacacatctctgaaaaaagcactatcgctgctgaagagaacaacacgattgttttcaaagtagcttctaatgcaactaaagctgaaatcaaagctgctgcagaaaagctttttgaagtagaagtaactggtgttcgcacactaaacgttaagggtaaaacaaaacgtactggcatgcgtttcggtcgtcgttcagactggaagaaagcttacgttactcttaaagaaggtagcgagctagactttgtcggcggcgccgagtaataaggggagttagaattatggcacttcaaaagtgtaaaccaacttctgcgggtcgtcgtcacctggttaaagtggttaacccagatttacataagggtaaaccttacgcaccactactagagaaaaactctaagtctggtggtcgtaataacaaaggtcgtatcacggttcgtcacatcggtggtggtcacaagcatcattaccgtgtaatcgactttaaacgcactaaagatggcattccagctgttgttgagcgtctagagtatgatccaaaccgtagcgcaaacatcgctcttgtattatatgcagacggtgagcgtcgttacattattgcacctaaaggcttaaaagcgggtgattcaatccagtctggtattgatgcaccaatcaaacctggtaacacgttaccaatgcgcaacatgcctgtaggttcgactgttcacaacgtagaattaaaaccaggtaaaggcgcgcaaatcgcacgttctgctggtgcatacgttcaaatccttgctcgtgaaggtcaatacgtaactctacgtcttcgttctggcgaagttcgtaaagttccatctgactgtcgcgcaacacttggtgaagtaggtaatgctgagcatatgcttcgttcactaggtaaagctggtgcaaatcgctggcgtggtatccgtccgacagttcgtggtgttgccatgaacccggtagatcacccgcacggtggtggtgaaggtcgtacatctggtggtcgtcatcctgtgtctccatggggtaaaccgactaaaggtgctaagacacgtaagaacaagcgtactgataaatttatcgtacgtcgtcgtactaaataatagttgaggaatagccatgccacgttctctcaagaaaggtccttttattgacctacacttgctgaagaaggtagagaaagcgttggaaagcggtgacaagaagccaattaaaacttggagccgtcgttcaatgatcatacctaacatgatcggattgaccatcgctgtccataatggtcgtcagcacgttcctgtgtttatcacagacgaaatgatcggtcacaaactaggtgaatttgcaccaactcgcacttaccgcggtcacgctgcggataagaaagcgaagaaacgttaagaggagaatgataaatgcaagcattagctaaacataaattcgcctctggttcggcgcaaaaagcacgtctagttgcagatcagatccgcggacttccggttgatcgcgctctagaaatcctggcgtacagccctaaaaaagcggctgtattagttaagaaagtacttgagtctgctattgctaacgcagagcataacgaaggtgctgacattgatgagcttcgtgtaactacgatctttgtggacgatggtcctacaatgaagcgtattatgccacgtgctaaaggacgcgctgaccgcatccttaagcgtacaagccacatcactgttgtggtttcagatagctaggagtataagtaatgggacaaaaagttcatcctactggtattcgcctaggtatctctaaaccttgggtttctacctggtacgcgaattcaaaagatttctctgatcagctttttggcgatcacaaagtacgtgcattcctaactaaggaattaaaagcggcttctgtgtctaaaatcgttatcgagcgtccagctaaatctatccgtgtaacaattcacacagctcgtcctggtgttgttatcggtaaaaaaggcgaagacgttgaaaaactacgtcaagcagtaactaagattgcaggtgttccggctcagatcaatatttctgaagttcgtaagcctgaacttgatgcacaactagtagctgacggtattgcgtcacagctagagcgtcgtgttatgttccgtcgcgctatgaagcgttcggtacaaaatgcaatgcgcattggtgcaaaaggtatcaaagttgaagttagcggtcgtcttggcggtgctgagatcgcacgttcagaatggtatcgtgaaggtcgtgtacctctacatactctacgtgctgatatcgactacgcaacttctgaagccttaaccacttatggtatcattggtgttaaagtttggatcttcaaaggcgaagttattggtggtttaccactagtacaagagcaagagaagccagctaaacgcgcgccaaagaaagccaaaaaaagtgctaagtagaggtagcgagtaatgttacagccaaaacgtacaaaattccgtaaaatgcacaaaggccgcaaccgcggtttagcgcaaaacggtaacaaagtaagcttcggtactttcggtttgaaagctactggtcgtggccgtatgactgctcgtcaaatcgaagcagctcgtcgtgctatgacacgtcacgtaaagcgtcaaggtaaaatctggatccgtgtattcccagataagccaattacgaacaagccattagaagttcgtatgggtaaaggtaaaggttctgttgaatattgggttgctgaaattcaacctggtaaagtactttacgaaatggaaggtgtttctgaagagcttgctcgtgaagcatttaaccttgcagcgcgtaaattaccattcacaacaactttcgtaactcggacggtgatgtaatgaaagctagcgaactaaaagacaaaagcgtagaagagctaaacgctgaacttctaggacttcttcgtgagcagttcaacctgcgcatgcaagcaagcactggtcagttagctcagacacacacgctaagaacagtacgtcgcgatatcgcgcgtgtaaaaacagttattaaccagaaggcaggtcaataatgagcgataaaatccgtactcttcaaggccgtgtaatcagcgacaagatggataaatctttcactgttgctatcgcacgttacgtgaagcacccagtatatggtaaattcatcaaacgtacgactaaactacacgtacatgacgaaaacaacacagctcaaactggtgacgtagttactatccgtgagtgtgctcctatttctaagactaagtcttggactttagtagacgttgttgaacgtccaaagcaagcttaatttttaattaagtttacttactaaaaagccccggcatttgctggggctttttgtttttaaaataaagctatcagcttttagacgtcagttgagcggtagacttgtttgctgcagagtttcccgctgctgtaaaacctcatatggcactcatgcttaatcgaaaccatctctacgaatagacttgagctagaaccttaaactttactcttgctaaaacgccactttttcttatgaactaattcactcatttaacactcttaaaaataaaaatgaggcgtttgggtgctaaaagggacttacaaagcatggatcatctcgattacgctacatgctttgcttttgttgttatttgctcaatatggaaagtttgtgaaactaccagtagcagccatagagccgccaaaagtaatcaacgcgtatgtgagtgtcgatttaactaccttacctagttttcagaaatcccaagacaaacctttaccggagcagccgcaagcaatgccagatgagactaagcctttgccagaaatagaaggagcttctcatagtggttcaaggcagagtaacggtgttgaggtcgttgagcacttagttaatgagcccaaagaagcaaccactaagatcgttaagtctaatcaagcatctgataattcaaaaacacccgaagcaccctttaaaaagctcaacccgtatgcgccaataccagagcttaaatttgaaaatagagcgactagtgcatcagcatttgggcaagttgaagctacgaataatagtttgcctacaggcagggttacagtgcctgcgcaattaaccgtctctgataaagcaactgtcgtttggcaaagtggcgatggtagcaagcgtatcgaggtgctaaatggtatgtgttatggcataaatttcaattcggtgtttggtaaatctggggtgccaagtggatcgccaagaccctgcgaagacaaagacgctaagttatttaaagaaataatgaataaatggagtaataaataataaaacactttacctcaacttaacttgagattttaaagtagcgttttttgtaatggataacgctatgaactcactagaaaactatttattaagcttacagattaattgctatcaagcgtcagcgattcaaatttctcaagtacaaacgcgtatttggcagtcattacaaaataattctagttatgcacatagcgtaatcgaagagtttgatttgaatggacagcctagccattaccagcatgcagccctatttacactggttttattgcagcttggctataaaataaagccaacgccggaaaacgctttatcggtaaggcataaccatttgttacatgacattcgtcttgtcgagcagttaaacgctagtggggcttaagtcatcttgtatcgtataaaaaggcacttagccgaaactaagtgccttggcttaacgaagttaccaaatcatttctacaaattctggatgatccacaaatgggttgcggttaccttgatgttcgtaagctgcttggttacggtcaagctctaattggctaacaggatcctcgttatgccattttaataacatagcaacgacccagttctcaaatacctgattagatgaaccattcaatacagcgttactgtaggttgtgttgttttgccacgagccaattacgttttcatagcgtgttgccatgtagaaataggctcttgcaaagtcacctttaaattcatcaataggttcaaataccgttcctgagtaatttaatgagctagctgcactgcctaacttactgccgttgctagaggtatagcttgcactaccaacttcaccaaatgggtagttactacgttttgaatttacataaccatcagtagcaaaaatgtgatgtacgtctgaattcattggctcaactgtaccgccaaaccaacttttcgggaaagaatgctcacggttgtagcaatctgcttcgctgttgtatgtcccacattgatcgctcacagcaacatagttgtaactgtcttggcctgcagggttttctgaataacggtctaaaatagagttgtcgttttcaaaatacttatcgcgtgaggcaacatcgtaaaaactccaaattgctgaatagccttgtgagttgtgatctttaatgatgttgtataactctgttttcagtgcataaccactaaggccttgcgttgtaacatagtatcccgttggctctgttggtgttttaccaccaccgtcaccgccgcctgagttatcacctaaactaaacggcgtagcttccgagctttggaagcttgcaccactggcaagtactgtttgacctaaagaaagattgtaactgccattgccgaatgagcagcatatgccatcaccatagctatcaaaaatagtaaaggtatagtcaccatcagttaaacatgcttgctcactgtactgagtatttgcagcatagctgccgcctgatgctactgtgctaccttggctattagtgatatgccagctggtttcttcaccatagttatcggtagtgagggttaaagatacttggttatcggcgcagctgcccgaaggtggtggtgttgagcccgtgcttggtgcaaagttatcaacataaaccacttcgctgccatcaaagcctgttacatcgtaaaagcgcaggccaacactaattgaggtagtcgctgaagctgtatactgatagctgatttgttgccattgattcgttaatgctgaattagagtaaccttgatagctatcaaccactaagcgagcttttacgccgccttcagtatggtaaacccaagcagaaaactcatagctttcaccggccactacatcaactaattgctgtaaatcggtattactttgcgtgccagtattaaccacaacttgcgctgagtaattacctgagtaaaccacattactattagcgctaagactaataccgctatctatggtgctccagcttgcaggggtgtttgctgaccagttttcgaagtcggcattattaacatttgccaatgctgaactcgctaaacacagtaaactactggctagcatgtattttttacatgtcccgtgtgacatcgttgtttcctttttatattttaatagttttagctgttctcaaaatgaacacagcgagtataggctaatcggcttatgttgcaataatgttaattaataaaagtttcttattgggtaatttttgcttttaacatgttttttttggataaatactaaattaataactaaatggaatatcaaagcagattctattcttttttaatcgcctcagaccccgttattcttcacgctcagataaacctttaaagcatttttgtttagtctttaaagtcgaaaaaattgttcgcgaaatgacggtagtaagctcgtttcgcagttaacttttcagggttacgaggaataaattcatgttgttaagtcaactaaatgcagcggcgagcccgctatcgcaagagcaagtacaaaagctgcaaggcttagtggctgaacttaatccaattcagcaagcgtgggtaagtggttacttagctgctaacgcaaatgcaggtgcattaactggtggtgttgctgccgctccagctgcgggtgatgctgcaccattgactattttatacggctcgcaaacgggtaacgccaaaggcgtggcgagcaagttaaaagagcaagcagagtcgcgcggtctaacggctaagctagtaaacatggctgactacaaaccaacagccctgaaaaaagaaaagtttatcacggttgttgtttcaacctacggtgagggtgagccaccagaagatgctgaaagcctccatgaattcttaacgactaaaaaagcaccaaagctagatggtgttaaagtggctgtgattggcttaggtgactcaagctacgaattcttctgccaaacagcaaaagatttcgaagagcgctttaacaagcttggcgcagaaactattttccagcgtgctgacctagatgttgattacgatgatgaagctgctaagtggattgatggtgcacttgatgcgtttgaaccagatcttaaagcgcagcagcaagcaagcggtggtcaagttgtggctatgccatttggagcagcagcgccagcagcaagccaatacaccaagcaaaacccatttgctgcagagctaagtgttgtgcaaaaaattaccggtcgtgactcaactaaagatgtgcgtcatgttgaaatctcattagaaggttcagacatcacctatacaccgggtgattcgctgggcgtttacttcttgaatgatgaagtacttgttgatgaagtccttgcgcttacccaaattgatgcatctagcacggttaaactaggcgatgaagagctcagtattcgtgatgcattaatcgaaaaattagagttaacccagtcatacccaggttttgttgaaaaatatgcaacagcaactggcaaccctgaattattaaagttagttgaagataaagcggcaatgcgtgagtacatcgaacctcgccaaatcttcgatattattcgtcaaaacccagctcaactagaagcgcaaaccttagtagactgcttacgtaaactacaagcgcgtttatattcgattgcatctagccaagctgaagttgaagatgaagttcacttaactgtgggtctggttgagtttgatgcatttggtagcgagcacttaggtgggtgttctggctatttagcgcgtcgtgctgaagaaggttgcaaagtaaaagtattcagtgagcataacgataatttccgtttaccggctaatgatgaaacgccaattattatggtaggtccgggtacgggtattgcaccattccgtgcgtttttacaagagcgtgatgctcgtgaagcaagtggtaaaaactggttattctttggtaacccacactttactcaagacttcttatatcaagttgaaattcaaggttacttgaagtcaggtttactgactaaagtggatgtggcgtttagccgtgaccaagcggaaaaagtatatgttcaagacaaacttcgcaaaaacagccaagaagtatttgcttggttagaagcgggtgctcatttctatatctgtggtgatgcaaaccgtatggcgaaagatgttcatcaggcgcttgtagacattatcaaagaaaatagcggcaaagatgatgaacaagctgagcaatatttaaaagatttacgtagcgcaaaccgctatcagaaagacgtgtactaatcacgtttaaagctaacagccgtcactgtaacaaatttaggaaataccatgagcgaacaagacaaaaacgtaaagctttctgataacgagcgtttgaaaagagaaagtaattttttacgtggcacaattgagcaagatttaaaagacgagatcaccggtggtttcactgctgataacttccaactgatccgtttccacggcatgtaccagcaagatgaccgtgacattcgccctgagcgcgctaaacaaaaattagagccgttacataacgttatgctacgtgctcgtatgcctggcggtattatcaagccagagcaatggttagcgattgataagtttgctgaagagaaaaccagctatggcagtattcgtttaaccacgcgtcaaactttccagttccatggtgtgcttaagccaaatattaaaggcatgcatcaaatgctcaatagcgtgggcattgattcaattgcaacggcgggcgatgtaaaccgaaacgtattatgtacaacgaacccagttgaatctgagcttcaccaagaagcgtacgagtgggcagcgaagatctctgagcacctattaccaaaaactaaagcatacgctgaaatttggttagatggtgaaaagagtgaaaccactgaagaaccaattttaggttcaacttacttaccacgtaagtttaaaaccacagtaacaattccaccgaataatgaagtggatgtgcatgcgaacgacctaaacttcgtggcaattgcagaaaacggcaagttagttggttttaacgtgttagtgggtggtggtcttgctatgactcacggtgatacagcaacgtatcctcgtaaagcagatgactttggttttattccacttgagcacaccttgaaaattgctgaacacgtggtgtctgtacaacgtgattggggtaaccgctcaaatcgtaaaaatgcaaaaactaagtacacacttgaccgtgtaggttctgatgtatttaaagctgaagttgaaaaacgtgccggtgttaaatttgaacagagccgcccgtatgagttcactcaccgtggtgaccgtatcggttgggttgaaggtattgatggtaagcaccacttaacgctgtttattcaaagtggccgtattttagattacccagataaaccgctaaaaacaggctgtcgtaaaattgctgaaattcaccaaggtgatttccgcatgacggcaaaccaaaacttgatcatcgcaggtgttccggctgatcaaaaagcggtaatcgaagagatcgctcgtaaccatggcctgattgatgacagccatacagagcagcgtaaaaactcaatggcgtgtgtggcattaccaacgtgtccgttagcgatggcagaagctgagcgttatttaccaagcttaattgagaaaacagaagcgctattagcgaaacatggtattggcgatgacaacatcattatgcgtgttgtgggttgtccgaatggctgtggccgcgccatgttggcagaagcgggtctggttggtaaaggtccaggaaaatacaacgtgtacttaggtggtaaccgtgaaggcacgcgtattccaaaactgtatttagaaaatgttggcgaagacgtatacctagacgcattcgataagctaattggccaatgggcaagtgagcgtaatgaaggcgagtgttttggtgattttgtaattcgcaaaggcattgttgctgaagttaaagtttcagtaactgattttcacgcataattttataagcgacaccgctttaaggtttggaattaaccatgagtgaatttaaaaacatcttaacgatgagcaaagaagaccaaacagccatgctggctgatataaatggtcttctggctgataaaagcgctgaagagcgtgttgcttgggcacttgaaaacttaccaagcacgcactttttgtcgtcgagttttggtattcaagcagcagtgatgttgcacttagtgacatcacagcagccagatattccggtggtactgacagataccggttatttgtttcctgaaacctatcagttcatcgagcaaatgaccgaacgactttcgcttaatcttaaagtttataaagctgagcttagccctgcatggcaagaagcgaagtttggtaagctttgggagcaaggtgaagaaggcattaagcagtacaatcaactgaataaagttgagccaatgactcgtgccttaaacgagctggatgcaggcacttggtttagtggcttgcgtcgcgatcagtcatctagccgagctgataagcaaattgttgaaatcagccgagggactgtgaaagtgtatccacttattgagtggaacaaccgtgacatctatcagtatctaacgaaacatgatttaccttatcacccactttgggagcaaggttatgtgtcgatgggcgatgttcacacaacacgtaaacttgaaccgggcatgacagaagaagagacgcgtttcttcggtttaaaccgtgaatgtggcttacatattgacggtgatggtatctaatcctaaattcctatcagaattttcgtaaagcgtaaccaaggttgcgctttttttgtgctatttatatacaatctcagacttaattctgtgagagaaaattatgagtcgtgttgttgtatttttatttttattatttattgctcctttagtacgagctgaaacgctgcgtgttgcactctatgacacagattaccctccttatcattttgcgagcgagaaacaaaaaggcttagttgatgagctacttgaacgtttcgctgaaaagtacaaagtgcaaattagttatattctcgtacctgaagtgcgctctcagcatttactggatgagggaaaggttgatgtgaggttggagtctgagcagtggtacagaggcgaaaatcactattattggagtgatatgattgctgttgtcgaagacgtgctggtgatgccaaatggttgtcatatccctccacttgataaactgaatggttttgctgtactgacgcgatttggctatacctatccgcaatttgaagctttgtttgcttcaggaaaagtacaccgagaagacttctattctgaattagacatgttgaatgctttacttgatcaaaaacaaaatcaacgtgttgccgtcatcgcaaaaaataccttgcaatggtatgccgcacaaaatgatgcctttaaaaagtttactgttagtgactacaacgtgggcaaagcgccgatgcaactacagttcatttataatgaaaaaggtaagcgcatgagcgaaaaatttaatgactttatgaaaagtcttaaatcatcgggggaatttgctaagattgtgagtaactaccaataatcggtaaatcgaatgattaagcgtttttgttaccttgccgttatgctgctactaaccagtatcgcgctgctgttttatattaaaaagccagacggtaaaccttacttagaactgagcatgttcgagcgttactcagaaaaagtcagtgatgatgtgagtgattttgcttcgcaaggagccgatacgcttactagccaagctaaaaagttcactgagaagttgagcttgagcaaagacgcaaatgcacctgtcgtggtgtataaatggcaagatgaacaagggcagtggcactatgctgatacaccccatcctaattattttagtatcgcggtaagtttagatccgaacgatataactgtgttacctgcagagacatttcaagcagatgagaagcaagcagcaacagttaaagctgacgaaacaccttcaacgcttggggtatacgaccctaaaaacgtacaaaaaatgatgcaagacgctgagcaagcaaaacagcttatggagcaacgtaacaagcaacttgaacagcagctcaaaaagcaaggtggaaattaactttgtttgttttgcgctgtgaggtcgctttccattttcatcagtaaaatagtgagataaattttggtgggtagtgagaatagcacaccaacagcaatacacgctgcgctgatcataatgccatgtatacccatgctatcacttaagtaattaccggctaataaagagtgccccaatataattaggcaaatacctaaaatgataaaggtttttaagattcgaatgatggtttgttcagtcatacaagcacctcactttagccataattaaagtgtaggtgctgttgtaattaataggattgttctaaatcaagcaattgtcggttatttgtccaattttactgggccgttgatgttatcgatacttaaatcacctgaacccgcttcgataattgtcaggccaagtgtgtcatccacataaatgctgccagagccatcggtgatggtaaccagcccttttacatgtcttacatcaatatcaccagagccatcttcgatagtgagcgcaccagccaatgttttaatgctgatactacctgattcatcaataatacgtgcagggccttggctgttttcgatgcggatatcaccagagtcatcttcaatatcaatacgcccttggccttggtcaatcataattgagccagagtcgtcttcaatactgatattgccgctgacattgctaatgcgaatatcgccggagtcatcatctatgttgatatttctgccttgttcaataatgattgagccagaatcatcatcaatgctgatatcgttttgcatcgcacgtatcacgatatcacctgagtcatcatcgatatctagtttaaggttgctaggcacagagacaattaaatcaatatgaggggatgagccactgtaaaacgacaagctaccattattgagcttgctgataagctcagccgtgtcgccgtgtttttcgagggttagtgtataggtttcatcgcctttagccgcatagatattagcattcactgtgatagccgtggcgttgctgtcgcctttgatgatcagtgagcctgcttcggcatcaatttttaatgcgctgatatttgcagccgacacgcttaagtcttgttgtttttgttctgcgatttgacccggagagacatgaataacacagcctgttaataataaacttgatgagatggccgttgcgcaaattgcgcgtttgaatgatgcaatagtcatatggattccaaaattattatggttgttatctggttagcatttgcaaactatggtccaattttaacattctgatttttatgtgcttttcattttttgtaaataagtgtgttgctctaaactgtaatttataccaattcgcttaattaagtggtctattttgaggcaataaaacctcgttgataacaaggcaaaaatttcgttatttagtttgttctaaatcagaaatttttaacgcaggtagcgacaggtttaatccctcaaaatgattaagtattattgtggattggtattactggtgatttaaacaaaaaaaggggctgaaaattcagccccttagttaacttaaaagcagttattgctcagccagcatattacgaagtacatactgtaaaataccgccgtgtttgtagtaatcccattctttaggagtatctatgcgcacatcaacactaaagctaatttgtttgccttcgctgttagtggcaatcacactgacttcattggttttgtcgtataagccctcaaagtcgaatgactcttggccggttaggcccagtgactcatagctttcaccttctttaaattgcagtggtaatacacccatacctatcaggttagagcggtgaatacgctcataactttgtgcaataacagctttaacacccagtaataatgagccttttgctgcccagtctcgtgatgaacctgtgccatattctgtgcccgctaaaataatcagaggtgtgccgtcttgctggtactgcattgctgcatcataaatactggcaagttcatcacttggttgtatacgggtaacaccgccttcagtgcccggcgctagtaggttgcgtaaacgcacattagcaaaggtaccgcgcatcatcacttcgtgattaccacggcgtgatccataagagttaaattgtgctttttgtacaccgtgatcttgtaagtaaagacctgcaggagcatcagctttaatcgcacctgctggcgaaatgtggtcggttgtaactgagtcacctaattttgctaaacagcgtgcaccactaatgctcggaattcctggaggctcaatttccataccatcaaagaatggcgcttttttgatgtaggttgacgcatcatcccaatcatatagtttgccatcaggaatttgaattttctgccaacgatcatcgccttgatacacattgccatagcttgatgcgaacatttctttggtcactgtttcacggacaaggtcgttaacttcgctaacacttggccagatatttttcaggtaaatgtcattaccattcggatcttgcgctaatggctcgttatatacatcaatatctgtgcgacctgcaatagcgtaagcaacaacgagtggcggtgaggctaagaagttcattttcacatcctggtgtatacgaccttcaaagttacggttacccgataaaatagagcttacgaccagtttatgcttttgaattgcttcactgatctcatcggccagcgggcctgagttaccgatacaggttgtacaaccataaccgacaaggttaaagcctaacgcatctaaatcatccattaagtcggcttttttcaagtaatcagtcaccacttgtgagcctggagcgagtgaagttttaacccaaggtttaacctttaagcctaattgttttgctttcttcgcaactaatcctgcagctagaattacacttgggtttgaggtgtttgtacaacttgtgattgcagcaatcacacaagcgccgtctttaagctcaaactcctcgcctttaaagttaaccttggcagcacccatgtattgggcttcgtttacctgatcatctgggttagttgttggaccttcatcttcaatgcgggcttcttgaacatcgctcttatcacgttgttgcatgcgctcttcttgaaagccacgaaggtgttcacctataatgctaccagctttatcaagggcgattctatcttgcgggcgtttaggacctgcaaggcttggcacgacatcatcaagtgataattcaagcgtatctgtgtagtgagcttcatcgccagggttacgccataagccttggtgcttagcatagtcctcaataagcttaagctgctcctcatcacggttagttaaacgtagatagttaatagtttcgtcgtcaatcgggaaaataccgcaagttgcaccatactcaggcgccatattggcgattgtcgcgcggtcagcaagtggtaaatcagcaagaccatcaccataaaattcaacaaattttccaaccacaccatgtttacgcagcatttctgtcacggttagcacaaggtcggttgcagttgtaccttcaggcaggcgaccattgagcttaaagccaataacttgaggaataagtaagctgattggttggccaagcattgcggcttcggcttcgataccacctacgccccaaccaagtactccaagaccattgatcatagtagtatgtgagtcagtaccaacaagggtatctgggtaagcgagtgatttaccgtttttactatcgttaaatactacacgggctaaatattctaaattaacttggtgaacgataccggttgctggtggcacaacttttaggttatcaaaagcggtttggccccaacgtaaaaattcgtaacgttctttgttgcgctcatattcaagcttcgcatttagatcaaatgagccatcttcaccgtagccatcgacttgcactgagtggtcaataaccagctcagcaggtgacagtggatttatctttgcaggatcaccaccgagtttttccatggcatcgcgcatcgccgctaagtcaacaattgcaggaacccctgtgaagtcttgcattactacgcgtgcaggtgtaaaggcaacttcagcagatggtttagcttgtgggtcccagttgagtaaggcttcaatgtcttgctttttaatattgacgccatcttcattgcgcaacaggttttcgagtaatatttttaacgaaaatggtaggcgtttggctttgtcacctaaaccttgtaaagagtgaatatggtattgttcaccattaattgtaagctgtttttgggtatcaaaactattattcattatttgcccctgtggtttgagcaagcaaagctcgcttttgtgtttccttttgaaatagacacattgccattgcaaacttaataccagctggtaaatttttctgctgatgaaaaaatatgctacttaaatatagttgatgcctatgtgatttatttcaagtgtaaagggcagattaaagtgtagatatttaaaatagttctcatgaataagtgtgtcaattaagccagctttcttgcttacctttattactaatcaaaagtaagactaagccaatcacaataacgcaaaatggcattgccagtgcactactgccaaacatagcaaggctatcgatcactacaaagttataatattgctgtactaacacagcgataaatgacactaaaaaaaactctctggctagggcttttcgaacaattagcataatactgccaaggcatgctgaaaataccgctacagcaaaggctgcagtagaccaaagggggatgttgcggtatgcgtcttgttgattctcgggtagtaaagcaatcatttcaggagtcattaactgttgcatgataaacgcaaaaacacctaacagattccaaacaagtgcagcccaagcaagtggtttaagccaagcaggaggggtcataaatcaccttttattgttgttattatcacattcaattaaaggtgatttatgctaactaagcaagatttagttaaccaaaagagatagggcggcggccggttttttcgtctacttttggttttttagtgcgtttacgttttgatttttttggtgcttcttcagagctttgtggttgtgctttttgtactgattctggtgggcgaggatttggtgttgcatcttcgcttaatgtaagctggaacaactcaccatcaaaagcaagcacgtcaccactgtataattttttccgctttattgtacaaatttcatagttaaccccaacataacctccaccaattaaggcttttgcttggccacctgtttcgactaggtcgagcacttttagcaagttacatagctctattggctcttcttctagttcaatttcgatgaaatcttcgttcatgttggtctctcttaattcagtcgcagccattataaagcctagcactcaattgaaccaagattaaattttcaagctcttcaagcggttaaaatttacagcaataaataatctgagatttttacaaacagtaaaaaaactgcagtatttgctggctacactgcgcgcgtatgaaattggtgtacaaattgctaattgcttatccgtttaatatttttagattcgttctggagtagtagtaatgggcgtaagatcagcgctaagaaaagagttaatgggattacaagattcatcattgctagcggcagatgatgtgcgagctttgctaactcaagctataaagtcgcagcctgaaaagtcagaacagggatttgcattaatttctcgctttaatgataaccatagccaattgacttcaggtgaagcaaataaagaaaaactgcttcagcatcaaacccaccgcttatttaaagatattctctacactcggcaaagtgttaataattggctgaaaaagcacctgaattaattgatttattgtttttctcgctttagactacacttgtaatctagagcgagaaagaaaatgaaaaggataatttcagcagccatatttttaattttggcaggttgtcagcaaccaacagtatacgtatacacagaaaatcttgatcaacaacagttgtacacattagagcaagctttaaataagcaaagcttaccctacgaatacactaagctccctattccaagagactttgctgatgcaaccttaatgttatcgagcgataaaattctcactcatgaaaccgagcaacttgcagaaattatgcaggggctgggttatcaagctgaaattaagtacaccacagaggctaatcatttttacaatcaaggcaatatagggttttacttacgagcaaaaaatggctcaactagtttcactatgccggctcgagtaataacaacgggttgcgttgaggatgagtttaacggccttgcggtcaaatttagtgataaacaggccgagtttaacctagcgagtggtagacgagtctcattagactgggattacttatacggctatttagtcatttattataaaaactattcgcaaagttacagccatttaacgccagaagtgagtaccccatttggtatgaaaccatcagatacctaccgttacacagcacgtgtaaataaaccagggtggcttaattgttcattgcaagttgtgtatatggattagctacgtgattcgagataattactcaatttcacaatacgctcactcatgccttcgattatgcgatctttaattttctcgcggatcacattgggcaagcgggtgagtgcttcgggggcaatagctaataaaatagtatctactctagcacgggcgcttgtgctatgttcccgattgttaataaaagcaccttcaccgataaactcacctgggtcaataatgccaagctcatgtaaatgactttgcttgaacaccagcagtgaaccacttagaacaatatacaaacgcttgtcattgtcgtactgcttgaaaacagcgcggccttgtttaaccaaatataaatgactgaatgactctaataacacttgtcgttcactaagagtaaactctctaaagaacgacaatctgttaattatttccatttgtttaatgagtggtatgtgttcgattaacttcattgattcacattgttatggcaataaattagctaatattgcgctcttttaacttacgggtcaatgtattgcggccccaaccaattttcaccgcggcgtcttgcttgtgccccgcacaattggctaatgctgttttaatcaagcgagtttctagctgtgcttgtatagccggccagatattttctttaccttgtttaagctcaaggttgagccactgctgaaatgcatccagccaatcaccttcctgttccactggagctgcggcaactatttcgggcggtaaatcttgttcgctgataagctcacccggagccattactgttaaccagcgacaggtgttttctagttggcgcacgttacctggccaattgaataagcgtagttgctctgtggctttagggcttagtattttgctttcaacttgaagctctttggcacttttatgtaaaaagtgctgtgctaatcgttcaatgtcttcggtacgttcgcgtagcgctggtaagcgtaaacgcacaacgttaagacgatgaaacaagtcatcacgaaacttgccttgtttaactaaatcttcgagattttggtgtgttgcagcgataatacgcacatccactttaatgctttgatggccaccaactcggtaaaattcaccatcggctaatacacgtaacaaacgcgtttgtacatcaagtggcatgtcaccaatttcatctaaaaataaggtaccaccattagcttgttcaaaacgacctttacgaatactgtcggcccctgtaaacgcgcctttttcatggccaaacaattctgattctactaactcttttggaatggcagccatatttaaagcgataaattggttttctttacgcggactatgattgtgtagggcactggcaacaagctctttacctgttcctgattcaccattaattagcacgctcatacttgatgctgataatttaccgatcgcgcgaaacacctcttgcatcgcaggcgcttcgcctatgatatgggcattcgtttgtggtgcttgcttacgcttggttttttttgttgaattagcacgacaggcgctctctaccagcgcaactgcttcatctagatcaaatggttttgcaaggtattcaaatgcgcctttttggaatgcatttaccgctgagtctaagtctgagtgtgcagtcataatgatgactggcaacccagggttttgttcggcaattgtttcaagtaatgccataccatccataccaggcattcttacatctgacactagaacggtaggctgactaaacttgagtgcgttaagcacatcttgtgcatttgcataactttctgtttcaaatcctgctcgcgccagcgctttttctaatacaaagcgtattgaggcatcatcatcaactaaccaaactgttttcatgactactccaaaaaaccattaatccgtaaaaggcaaatagatattaaattctgtatggcctggccaactatcgcagtcaatgtgtccaccgtgttgatcaaccaaagtctgtgcaatggataaccctagtcctgaaccattttctttgttagtgatcattggataaaacaaggtttctcttaaactcttatctattcctggaccattatctgaaatctggatcagcaaggttttcttcggtgctttaccaggacgtctatgttgatggttaatacgggtttttattctaatttcgccaccatcaaccagagcctgctgtgcattgcgaataatgttaagtaccacttgttgaattttactttggtcaatgtacacactcggtatacttggatcatagtctttcactaaagtgatattagcgctgttatctaacatgctaagcttaatcactgactcaagagcttggtgaatattgccatatgatttatgtggcaattggtttggaccaagtaaacggtctacgagctctcgtaatcggtcagcttgctcaatgataagctctgcacattgatcacgctcttgctgatcaacctcgtactgcaataattgcgccgctccgcgtattccacccaaaggatttttaatttcgtgtgctaaaccacgaattaaattgcgtgcggcttgatattggtgcatttgatttgatgcttgatcgtggcgaatttcatcatccatttgtcggcactcaaacaaaatataattttcattattgctgtttattcggcgggtgctaatggttagcttagcatggcgagaatcgacgaacaccacgtcagctctatgctggtggcagtcaacgccatcaaacaacgagtactgagcaatacgttttaggtcaatggagtggtagttaaataagttatcgaatggctgattaattatacgctttggacctaagcctaatagctcactagcactatcatttgcataaaccagtttaaaatcattatcgagcaaaataacggctgtacttaaatttttccaaatactttcgagtagttcagaattaaaatgtgtatcactgagcatgtttgcaccattttagtgcgttgcaattaacagcagcttagcacaatccatttactttgcatgataccggctcgaaaaaaatagtttcaattaagtatcgatgctctgtgcatgtagaaagtgctaacagggctaaccgaaacgactttattattcgcatctatgagttttgcttgtaatgtgtgttcgcctcggtcgacatttcgcaatgcaaaggtcgtgctattactcgatttcccatgaggtgtgccatcgactatcagctgtactttgaagcctgttgcaaaacgcggactcactcgtgctgtgacgtatactgagcctgtattctctcgaacggttgcctcattttctggtgaggaaatcgttattttaaagtttacaggtgtcgcactagccgggttatcaagtatgctggtgtcggttttaggcatggtaaggttttgagtattgagctttacttctttagccccagggcgaggtgagtctgagaacaccaaaacaccattctcatctttccacgagtaaattttttttacttcactttgtgcgtaattgcatactgtaaaaaggagtaatactaataaaatcgtgtttttcactctgtgaccctaggttatctaatctaactaaaactttagagtagaattggccaaattaccatcaaaaaagcccgcaaagcgggcttgagaacacacatttattatcaatctgataattctgatacggcgttaaattaaacgctgtagtacatttcgaactcaactgggtgagttgtcatgttaagcttttcaacttctttgcccttaagtgcaatgtaagcatcgataaggtcatcagtgaatacgccgccagcttttaagaactcacggtcagcatctaatgaatctaatgcttcttgcagtgaagatgcaacttgtgggatctctgcagcttcttcagctggaagatcgtataagtctttatccattgcatcaccagggtggatcttgtttttgataccgtcaaggccagccataagcattgcagagaacgctaagtatgggttagctgttggatcagggaaacgtacttcgatacgacgtgctttagcagacggtaccactgggatacggattgaagcagaacggttacgtgcagagtatgcaagcattactggtgcttcgaagcccggaactagacgcttgtatgagttagttgacgcgttagcgaatgcgttgattgctttagcgtgcttgatgataccaccgatgtagtaaagtgcttcttcagatagaccagcgtatttgtcaccagcgaagatgtttacgccatctttacctagagattggtgacagtgcataccagaaccgttatcacctacgattggcttaggcatgaatgtcgctgtttttccgtataagtgagccatgttatggataacatatttcatctcttggatttcgtcagcttttaataccattgtattgaagcgagttgcgatctcattttgacctgcagttgctacttcgtggtggtgagcttctactacttgacctagttcttcaagaactaaacaagttgctgaacgccagtcatgtgatgaatcaacaggtgaacacgggaagtaaccgcctttaacacctggacggtgacccatgttgccaccttcgtaatctttatctgagttccaagcagcttctacagaatcgattttgtacatagaaccagacatgtctgatttgtatttaacgtcatcaaaaaggaagaattctggctctggaccaaataatacagtatcagcgatacctgtagaacgcatatactcttcagcgcgttttgcaacagaacgtgggtcacgctcgtaaccttgaagtgttgaaggctcaactacgtcacaacggatgattagtgtagcttcttcagaaaacgggtccattttagcagactcaggaacaggcataagcaccatatctgattcgttgatgcctttccaacctgcaattgaagaaccgtcaaacattttgccgtcttcgaagaaatcttcatcaatttggtgatgaggaatagaaacatgctgttctttacctttggtatcagtaaagcgtaaatcaatgaacttaacgtcattttctttgataaaatctaaaaccgattgtgacatgtgtcctccaattgttgggttttatttttgctgcattattgcttttgctctatgtaagctggtttcatgccatttttttaaggtgttgttaaggctgataaaaaagaaaccgcttgttgttatgttaactttttatgcactgttttggtgcgaaaaaagatcattttggtgcgtaaaaagaatgacgacgatttgcacaattactgagcgtgccaatttatcggttctaaatacgattaagtgccaaaatatggtttaaaaaatgcaattttgccagttttatgcttataaaaattattattttcataaatttgtcatttataaaacagatacttataaaatgcctgaagaaagttttgaaaattgtattggataaactttcatccatgccattattaagggataatatgcgcccttttaaatcctatgctgggacatctggtgaaaatgccggtgagtgcgtagatcttgcaggatcaatgagattcaatttctctgagaaaaaatatgagcatcgaaaagttaagaaatatagcgattatcgcccacgttgaccacggtaaaacaactttggttgataaactgcttgagcaatcaggcacattagaaacgcgcggcggtaatgaagagcgcgtaatggactcaaacgacattgagaaagagcgtggtattaccattttagctaaaaacacagctatctcttggaacgactaccatatcaatatcgtagacaccccaggacacgccgacttcggtggtgaagtagagcgcgtactttcgatggctgactcagtattactacttgttgatgctcaagaaggtccaatgccacaaacgcgtttcgtaacgcaaaaagcattcgcacaaggtttaacgccgattgttgtaatcaacaaaatcgacaagccaggtgcacgtcctgactgggttatggaccaagtattcgacttattcgataacttaggtgcaactgacgaacagttagactttaaagtaatctatgcatcagctatcaatggctgggctacattagatttagacgagccatcagataacatggaaccaatgttccagatgatcgttgatgaagtatctccaccggatgcagatcctgaaggtgctttccaaatgcaaatttctcagcttgactacaactcatacatcggtgttatcggtgttggtcgtatcaagcgtggtactgttcgtcctaaccaacaggttactgttgtaagtgcagacggtactaagcgtaacggtaaagttggccaagtaatgagctacttaggtcttgagcgtcatgaagcagaatctgcaggcgctggtgacatcattgctatcacgggtcttggtgagctgaaaatctcagacactatctgtgatgtaaatactgttgaagcattaccaccgcttagcgttgatgagcctacagtaacaatgacgttctctgtaaacacttcaccattcgctggtaaagaaggtaaattcgtaacgtcacgtaacatcctagagcgtttacaagcagagcttgttcacaacgtagcactacgtgttgaagaaactgacaacccagatagcttccgtgtttctggtcgtggtgagttacacttaggtatcttaatcgagaacatgcgtcgtgaaggctacgagcttgcggtttctcgtccacaagtaatccttcgtgaagttgatggtcaaaaagaagagccatacgaaacacttacaattgactgtcaagaagagcaccaaggttctatcatggaacaaattggtcttcgtaagggtgaactaacagacatgtctccagatggtaaaggccgtgtacgtatggactttatgatcccaagccgtggcttaattggtttccaaactgaattcatgacattaacgtctggttctggtcttctttaccacacattcgatcactacggcccacataaaggcggtactatcggcgcgcgtaagaatggtgtaatgattgctaacgcaacaggtaaagcacttactaacgcattattcaacctacaagaccgtggtaagttattcatcggtcacggtgttgaagtttacgaaggtatggttatcggtatccacagccgcgataacgacctaacagtaaacgcacttaaaggtaagcaacttactaacgttcgtgcatctggtacagatgaagcacaaacgttaacaccaccacttaactatacgcttgaacaagcgattgaattcatcgatgatgatgagttagtggaagtgacacctcagagcatccgtattcgtaaacgtcacttaactgaaagtgagcgtaaacgtgcgagccgtcaagctaaagactaataaggtcatgtagtttcataaaattagaaccgccgtattgaaagatacggcggttttttttagtggtcagccaagtaggttgagcgcagcgatactcaactttattcatgtaaaattttaaacttaactgcacttttttgctaaaccccccatctgtactatcttttctaaatcgaccttgcaggagagtgagatgtacttagttagacttatttatacaagtgaaattagcgatgggtttgggcctggggatattgaaaatattcttgagaaagccaaacaaaacaatagcaaaatgaatgttacaggtttgctttgctttaatactactcactttttacagtgcttggaaggctctagaagtgcggtaaatgcaacttatcaccgtattttgaatgatacgcggcataaaaatattattatgctaaattattgtgagatttttgaaagagagtttgagaactggtctatgggctacattccttactctagactcgttactccgattaccctcaaatattctggtacgagtgagtttaacccgctcgctatgtctgcaggtagtgcacacaaactaatgttggcgctcagggatttactgcttaaaagttagcttaataccaattcgctcaattaagcgaattggtatactagaacaagcagcattatagtgaaacttgctcaccttcattaagaatgtacaaagggagcttgctagacattcttgatttcattgttagtaatcttagtagtgccgaatggcttgaatggtcgcccatttgccagcttgagttaccataaccccaagggatcatcactttacagcctagctcctcagctgcgttaatagcatcttcaggtgtagtatgaacatagcgataccacttaccatcttcttcatggtaataagaagctatcggcataaggcatacatcaatctcgccgtatttctgcttaatatcctgaaaatgttgtgagtaaccggtatcgccagcaaaaaataaggttttaccattttgttctagtaaccaaccattccagagatctttgttgtgatcttcataaatgaatgggactagagttcggctactaaaatggtgtgctggcaccgcattaacagttaagtcattaatttgtgtacttgcgtaccacgccatttctgaaatattaaagccgccagtcggaaaattatctgcaaatcctaatggcactaaataacgcggtgaattgccaatttcttctatgtcggctttgttaaaatgatcatagtgaatatgtgaatatatcacagcatctaagccatcaagctctgcttgtgttggccaaaaacctggtttgcgataaatgcccccagctagcctaaaggccaagtctacaggcgaatcaaattgctctttaacagggtcaaataatagctgctcaccattgggtgattgaatataaaagcctgcatgacctaaccagcgaactgtaaaccctgagtttatttcaggtatgctttgttctgcttgatattggcattgtgagttgctgtcgtcacatataagtagctctgatggttcatagcaattgtcagtacaggttgttgggtattctttatcaccaggatataggttatgaaagcgaccttcgtagtctccttcagtttttaacggagtaatagtgccttcaccggcaataacattgacagtattagggctgctacaagcagttaagagtgcagctgcaatgagtgctgagagtgtttttaaatgcatactatgtttactttttattctttgccgtgagtttagcaaaataaaatttaagataaatcattaaaaagtaacaagaggttacaataaaaaagcctacgttttagtaggctttgtaagaactcgtttgcgcttattagcccgctttattcatttgctcaatgaacttattagagtctgcgattgatttgttcatgtcgtccattaacacttttatatcgcgtttaagattcgtaaattcacccttgatggctgtaacagcctgtgcgttgaggttgtgctttaaatacagaacgttgtcatgcagtgatgataacaccggctccattttgctttctgcactgcgcattgagcgaagtagttgatcaaattggcgcttagttgcattgagctttttgctgctttcacgttttagtgaggcgcttttgtattgctctagctcatcagcccattcttcaaatagtgcctcagcgacatcttcaactttattgatattatttgttacgtcatttgcagccgctaggcttgattcataatcatcatttagttgcttatatgcatcctcaagttcaccgccattgaaattgattaatgtggttaatctatctagggctgattgaaattcttcttgggattcttgttgtgattcttttgtttcttctacgcggtcgactaaaatgtcgcgtttgtggactcctacagattccatagcagagtaataagctgactgacagcctgataatgccatggttactgcaaatagtggtgcacttaaaagtgtcagttttttcattgagaatcctttttaggtacctgtcatttcaaattatgtggtggattgctatgattatcaaaacattttagcagaaattagattctatggatgagaagctcactcgttataagctgcaaataagcattttcttaaagcaacaacctacttggtggatgcagtatctcaatcgttgtattgacgatcaaattactgttaatgcaggttatttggcttatgtaaccttgttatcaatcgtgccattagtggcggttggtgtcgctattttttctgcttttcctggatttgaaagcacgttagtaaccatagaaaatttcttatttacaaatcttgtgccgacttcttctgatgttattaaagagcatatcagcgcctttgccggtaatgctaataaaatgaccgcggtcggtgtgggctttttagcagcggtgtccttattactcattcgcaatgtcgatgccacattgaaccgaatttggcgtattaagaaaaaacgccccatgatgatttcgtttgccgtttattggatggtgcttagcttaggcccagtattactcggcgcgagtattggtgttacctcatacattgtgtctttagtatcattcgctgatcaaggtattcctggattcagcggctttttattgaaactattaccttacataatttccatgattggcttcattatgctctatactttagtgcctaacacacgagttccatttagagcggcaattccaggcgctttgtttgcagctatgttgtttgagctgacaaaaaaaggctttgctctgtatatcagtcacttcccatcttatgaagttatttatggggcgttggcgacgatacctatactatttgtttgggtctatctgtcttggattgtcgtattactcggtgcagagtttacggtatgtatcagtcctgaagatattgaggatacacctgatatagacgtttaatagcgactgcacctaaggagagcgaggtgcagttacatccacattatgttgccaaccgtgattaccatttgagtgttggcgatggccatcaaatccatgtgcaagaatatggtgcgtctacagggattgctgtggtgttatgtcatggcgggcccggagcggggctgtgccctgaaaattgccgcttttttgatttagaacgttatcgagtgatcatgttcagccagcgcggttgtggtcattcaaccccccatgatatcaacacaaacaccacattagatttagtcgctgatctcgagtttttacgccagcaactcggcattgaaaaatggctggtgtgcggcgaatcgtggggagcaactcttgcacttgtgtatgcaataaaacatcgggagcacatcgcaggacttattttacgggctagttttttagcttgtaacagtgactttgaatggctttacacaactaaaggcgcgggcgcgcatttttacccagaatgctttaaagagtttgctcatgattttaccgattggcatgccttactcgacttttatcagcaacaactaaatagtagcgatcaaattaaagccagcaaattcgctaaactatggtgccattgggagcaggtgttatgtcatggtgagccattaactaattggagtttgcaagagccccatgtaggcttaaatcaagcaaggttaatggtgcattattttcgtaatctttgttttattgaagagggttacatcgcagaaaatgcgcatgttttgactcatttacccatttggtttattcatggccgggccgatttgatctgtcgatatagtgccgtacagcagcttgctgaacagttaaatgcacaattattgatattagatggtattgggcacagtagtgataatcaggtatatttggcagcaatgcgacgtgctgcagatttaatgtatatcaagttatcgagggatcaatgcaaggtttaattcaaagagtaaaacaggcaaaagtagaagtggcgggcgaagtcgtcggtgaaatttcacaaggtattttgttgctattaggcgttgaaaaacaggataccgaacaaagcgctcagaagcttttacataaagtaagtaattaccgaatttttaccgatgaacaaggaaagatgaatttaagcttgaatgatatcaagggtgaactgttggtggtttcgcagtttacactagccgcagacactaaaaagggcatgcgtccgagcttttcaagtgctggtacgcctgatcaagctaatacgctctatgagtattttatcgctgaagctaaaaaagccgggttaacagtagccacagggcaatttggtgctgatatgcaagtaagcctatgtaacgatggtcccgttacttttaatttacctgtgtaacagacaactactttttgatcatcacgatatgattcacataattagggatcttttcgatacttggtcgcttgccgaattcggtgataagtaaatgctcaagttgctttaactgcgatgggtgactggataaaaagttaataaataatacgccatctttagccatcgctgagcgaagcttggcataaaaagtatgtttgtataaaaacagtgggccatctacttcactgaataaatccaatataatccaattgtattcgtgtccttgctcaagtatttgttgagcatcgaaacagcgtaaattacttgtgtgatctccaccaaagtagcgtttataacagtgaataatatcagggtttttttccactgaaataagctggctatcagggtaggtatgctgaagatagttacgaattgccccgccacctaagcctaactctaaaatttttttaggttcatcaagtttctgccagagcttcgcaagatattgtaaatgagggaaaagaagcctgttaggctgacgtttttcgataacagattgaagagtttcgttaatcaataaccaacgtagttgattgagttgcctaacttgaatgctgtaattgccttgcttgtgccagtaaatcagctgccctaactggtgacattcttcaataaaactatgctttattgcgccactgggttcaaaaaaatgttccatatctcgggcctttagcttttatgtttaaaaagtatgacaattgtttcagcatagactagtcaccataaagtgcaattgtgcattagtttttacagctcaggataataatttaagctgggtcaccaaagtattattccaacttgcaagaagatcgcgtatcgtaatttgcattcgtcgcgccacgttagaaaaataacagacagtggctgtattttcacaggagtatttatgtttaaagtgaccacaccgcaaagtagcgaagattggcaagcgtattattcattacgttggcaggttttaagagcaccttggggtgagccgcgcggttctgagcaagatgacttagagcaagatgccgagcatcgctttattaaaaacaatgatggcgaagtattaggtgtagcacgtttgcattttaataatcatcaacaagcacaagtacgctatatggcggttgctgaagggaatcgtaatcagcacattggtagtcgtttactgcatgagctagaaaaaatagcgtggactcaagatgccgatgagctcgtgctttttgcccgtgaacgtgccttagagttttataaacgtcacggctacgagctaaaagaaaaagcgcaccttgcctatgacgatgtacaacactggaaaatggtaaaacaaaaaccgtctgagccgggctggttccgtcatccaaactggacacaagtactgcaaaatacgtggcgtgagtcgattccaatcagtgatgcgatgggaattaaagttgaaagctataccgattggcaatttactactcgcgctgatttagatgcgaacttaaaccttcataacactatgtttgcaggttcaatttacagtctagcgactttaactggctggggtgctacctaccttgcactgaaagaagcaggacttgaagggaatatcgtattagctgatgctaacattaaatatcttaaaccactgaataacgaccctcgtggtagtgttgagctggctggctgtaaaggcaagttagcggatttagaagacagtggcaaagcaagctaccatgtaccagtgaatgtatatgatggtgatgtgttagttgctgaatttgaaggtcacttcattgttaaaaaataacgcatattcagagcgagctaactaaagctcgctctttatcagctaaagcaagtcagttaatagaatacccacaccaaaacgttcaatatcggcgttgtaatcaattaagctctcgccataaccattaaagtattgtgcgtaaccacgtaatctgccccaaagagggaaagaccaatctaattggattgcaccacggttatctgaatttaggttattacgggtcataaagctaaattcatgctcgttataacggtatgcacctgagaattcaaagtaacccatgtatttgtaaatatcagggttgtcatcgccacgcgcttctaattcatcgtcttttttatcttcaggaattcggtaccaaggcttaaagctaaatacaaagccgtctttttcccacaagaaatcggcatagatacggttccatgaacgtgaatttggttggctgcgaccattagattgatgtgatgcaccaattgcaattgccatttcatcgccccaaagcacatgctcaggatcaaggtagttcacccagaagatctctggttcgtagtttgtttcacgaaacggtgatgaaatatctttgttataaaactgccaaaacgattgcatggtaaacgcaaagaatacgccctgatctttatctgagaagccttcgaaaataggtactttaattgatagttgatatttcacttcaaggttatcaagtggttcaccatcagtttgctcagcaagatcttttaaaccatcaaatggacgctcattcggattagatacatatgaaagtggtaaaatgtagttacgcttatgaggagtgatcacattacggtttttcttgctcacttcttcacgggctttacgtttgtctaaagcggtaagctttttactctcgtctaagtcagagcattttttacgaagttcttcgagtgtttgtttgccgtcaccgccaatggcttcgttcaaaatacactgctttacgagttctagcgcgtcatcttgttcattggtttgtggttgttcagtttgagcaaatacaggtacagaaaataagccagcagctgccagccaaatgcgccatcccattgcagttcccttttgaatagacttataagtaagaataattataacgatttttacataagtaaccgtgaacttatactgaattgttgatattttaggtaaatagagagccccaagctaagcttggagccctgctgtgacggcctaagggcataagccgtcgactctcacgcaatgagaaggggtgagcttatagctcaaatacgttggtaaaaaacttataaagttcggtgccttgattcacgcttgctgaggcaaaatgcaaaatagcgatggcgtctttatcaaaactcaatgtttgtagtggctgctcagaaaggtagcgctccattcgtaaaatatgagcaataggttcgcctgcttttatatggccaccgagtggtgcaagatattctaccatgccacccataggtgcgtagtaagctacataatcttcaagcatacaggcatagcgtgtcatcgcttttggttgatatgcggcatcaaccaatacctctttataatttaggtaacttaaaatgctattggcgtcttcaagggctgcacttaaatcgattttttcttggctaccaagttcaacggtaaatgcttcgacttgaactgcaaattcacggccttgtttggcaagctcttcagataacgaccaccacgggcagaaactcgcttcatccattgcgccatcaaaatcacttgggatcaataacacatgttcgatgttgaaatagctcgcgctggctttggcgtattgggggcagtataagtgcttacttgagataggccctgtgtgaagatctaaaacaatatcagcctgatgggcaagcttttgcaagttaagtgcaatgcgcttacccgttgttaagctgtaatcagggcccgttaattggctgtcgatgtcagcaacgagtgcctgtttaaacgcagctttaagggtcgcatcatcactgtctttatgctgttcagcaatctgtgacggtaacgctttattaaagcggtacatacggttccagttggtgccagtaattggatcgaagcgacctaaagtaaactcacctgacttttgattacaaccaattgggttggcataaggcactagggtaatatcgccacgcagcttgagtgattttagctgctcaagcaattgataaattacagcgttaccttgtacttcagcaccgtgcatattagcttgtatatacacgtttggccctgtgccatcgccttttaaacgatacacaggaattgtcagtggtaggccgttggcaatttcgccaaccacaatattctcttggctgattaattctttactcatggtgattaccttaaataatagctggcatcttcagcgctacgaatgcactcaatattgccttgttcaaggatgtattcagccgctaattcgtggcataaaaagtacggcatactttcggtaaagccatacgcgccacattggctgaataccaaccagtcttgctcacttaaatcactagctagttggtgctcacccaagcaatcaagtgcagtgcaaagtggcccgtataaagtcattgcacttggctcagccgctgactcacgcagtaacgccgcaggaaaatcttggcttgtcactgcagggcgaagtaaatggttaataccgcctgataaaatcacctgctgttgattgtaattttctttgcgttcaacaaccggtgtggcgtaatggccgcattcgcccaccgcatagcggccaagttccatccaaagctctttgacaccggcatctgctttaatactcgccagagtctcgataagtgcagaccaatcgagtcggttagcatcttgagtataaggaatgcctaagccaccccctaaatcgagaatagtaaggttaatatttaatgcgcttgctagttgttgtaatggcgcaatcatcgcacgccatagctcggcgagtttgtcagtgctaagcatattgccccattggaaaatatgcaggccatcaaagttaagagcagggtaatcactgactgtgagcgcttgccactcatcacagcccaaaccaaaaggagtaaggctatcgccgccaagtgggttcttttcgctgtctggccaacgaagttgtacacgcaacagaacttgcagctgacaatttgcttttgttgcttgctcatttaaccagcgaacttggtttatgctctcggccacgaaggtacgtacgccgcgagcaataaaatgtgaaatttgtgcagggctctttgctggccctgtgttgagcacgcgctcgctatcgatgccttgggcaagtacttgctcaagttcacctttactcgcaacatcaaaattaaaccctgcgctgtctaaacattgaataatgcgagacagcgggttggccttaacggcataccaaagtttcacatcggtttgcgcagttagttgatttaaatgtgcagttaatttatctaaatcatagataaaaaatggcgtatcaagatgtgttgaaacttgttcaaccgcttgcttgatgggcgtgctcaaaaagctcattaacgtaaaacctcttctaacaataatgatgcatcgctttgttcgtcacggtatttcacgatcaatgcacaagacatgcttaaaccttgctcgcgagcccatgcatttgaagcagggcgagaacctgggattacaatcgcgttttctggaattgcttcacctttgtctagctggcgctcattaacacaatcgtagacagggatggttgcagataagcgcacacccggcgcaagtacagcaccttttttcacaaccacgccttcaacaataacgcagcctgcaccgatgaaagcgtcatcttcaataaccacagggctggcaccaattggctcaagcacgccacctagctgtactgctgcacttaggtgaacatttttacctacttgtgcgcatgaacccactaatgcgtgactgtcgaccatcgtgccttcgtcgatgaatgcgccaatatttacatacgctggtggcatgataatcgtgcctttagcaacgtgtgcgccacgacgaacactgctaccacctggtaccatacgcacgccggcatttgcagcaaagccctgtggtgctaggttgtgcttatccacaaaaccacctgggaactcggtattagtaccatttttgaaggcttctaaaatgccttgtttaacttcaacattggcatgccagttgccgttttcgtcttgtgtagctgcgcgcactgcgcccgattctaagttgtttaataattctaaccagctcatgataaaacctgtttttagttccaagataaaattgtgttgtttgcgtgggtgatgctgtctgtttgctctagctctaaatgcgtaagcggcggacgtaaatgcggggtatttattttaccttgcaggtgcatcagtacttttacggggattggatttgcgacagcaaataagctttgaatcgcttgcgaccaatcggtgaatagatttggatattgaccacttaaactgcgtttaacaaactcatgggtttgactcggccaagcatttgcggcaaccgaaactaaaccttttgcaccagcttgagcaaaatacggcataagtgcatcatcaccactgaagatagccagtgttggtgatgccgttctaaagccttcaaatttgctaatgtcaccactggcttctttcaaagcccaaaggtttttgtgctcagcaaggtttttgatcacctgcggtgaaatctcaactgcactacgtcctggtacgttatacaacatacaagggtgatgacttgcgttaagtaggctttcaaaccaatgtgtttggccaacaaccccaggttttgcatacagaggagagcccaatagatagccatgaataggtagttggttgcagtattcaacccaagcaatttgctgcttaaggttcatgccgcccacagcgaccataagtggtacagtcggtgataattggcaaacatgctcaacaatggcttgttgctctttaagtgaaagcgccagtccttcgccggtgctgccaagcaataaaatgccgttattagcatcttgctgctcggcgaccagttgcccaagggccgtgtaatcgacctcgccagattcagaaaatggcgtgacaagcgctgtccataatggatagtcgtttaaatcaaaattgttgatcatctctcacgaacttataaggtattcgaagagtttatgcgggagcaattgaatggagccgcatgtcgtcattcgaacaaggtataattcgaagagcgaatgggcttaaaataataaagacgcaacggccttattatactaagaccagaagctctccaccaaactaatcaatagcgttttgctattgttggtgacagtcgctgggattcagcccagtcgcccgaaataagcacctcacaaacggtgttacttctcggcgttaattcccctcacgtatgatcagcagagtctgtgctcctcccatacgctacctgaataacgcacctcttccagccctttatgctcgctttatagcttaaagccaacatagttaaatagggtatcagcggcgattaaagcattttagccatctaggtgtcaaggcggagtattcgtttttttagtgaccgattttgcaacatggttacgtataagcgtgtttttagtacactagtattacccagacgaattggaagaaaaatggaaaagtttaacgatatctatcagcgagctgtcacccgtaagggcagtgaagaaatgctgcttgcactgctttctgacccgcttgatagcgctgacattgccaaaatgcatgatgacttatggttggaagagttaacgcgtaaagtgttccaaagtggtttttactggtctgttatcaatagtaagtggtcaggatttcgagaggtattttgggacttcagtgttgagaaactattaatgatgccacctgatatgctcgagcaaaaagccagtgatgaacgtattattcgtaactttaaaaaagtacaaacgatccctgaaaatgcctacatgatccatgaagtagctgaaaaacatggcagtttcagccaatttgtagctgattggccagtaaataatattatcggtttgtgggcttacttaaaaaagcatggtgcgcgactaggtgggaacacagggccttatgcattgcgtgccatgggtaaggatacttttttactgtctcgagacgtagaaaattatttacgtgctcatgaattaattgacggtggcttacaaactaaaaagtcattacaagctgcacaagactttttcaacgagctacaacaacaaagtggctttagcctgcaagcgctaagtcaattagttgcctatggggtaggcgataaccgcgttggcatagctgcgcgataggattttttatgaaactgcaaactaggtataccgatatcagcgaactattggctattgaagatatgcctactcgcgccgctgatcccgcattattgttattcaatgataaattagctcagtcgcttggtattagtcatgatccagaatacctagcaggacagttaagtggctcaataactgatgacagcgtaaagcctattgctttaggttactcagggcatcaatttggtcatttctcaccacgtctgggggatggcagagcgcatttgcttggagcagttaaagacgttgaaggagtactgtgggacatacagcttaaaggggcgggtgctacagtgttttcacgtggtggtgatggacgttgtgcgattgggccggcggttcgtgagtttataatgagcgaagcgatggctgcattaggtgtcgcgacaactcgctgcttagctgttgttactaccggcgaaacggtgtatcgacaaccacctcggccaggcgctgtcgtaactcgcgtagcaaaaagtcatattcgcgttggttcatttcagtatttagcaacccagggcgatattgaaggcttagaaaagttagttgattacgcactcagttgtcatttcccagagatagatacacgtgcagagcaacgttatgtagactttttaaccgcagtcatagacaagcaaattgagcttatcatcagttggatgcgagtgggattcatccatggtgtaatgaatacagacaatacattagtgagtggtgaaaccattgattacggcccatgcgctatgatgaaccagtttgactttgatacagtgtttagttccatagaccatcaagggcgctatgcattcggtaaccaaccaaacattgcgaattggaattgcgcgcgattagctgagagcttgctgccattatttaaaaatgaacagcaagctttgtcgttattatccagtgcagtaaatagttttgctgaaaagtttaatcatgcatttactacaatgtggcgacggaagttaggacttctagatgaacacgacgataaccaagctttagtgactgagttactcactctgatgcagcaaaataaccttgattatactaatactttcaatgctcttacggagtcattacttgcggattttgcattaccggatagtattaaggggtgggctgcaaagtggcgagtcagaacatcggctgaaagttatgacatcatgcgtgctgttaatcctgcagtcattccacgcaatcataatattgaaatgatcttggcggaatatgaaaaaacaggatgtagttcaatgctgaatggctttttatcagttttatcaaagccctacgtttacgatcagcaattcgaatcttggtatgagccacctgaaaatggcgatgctaattatcaaacattttgtggtacctaatgcatttgtacttgcttgaaataaaaagtgtttatttagtttttttaaatgcttgctgattgagcagaataaacgcaagtgctatcatagaatggagttaacttattgctttagatgatgatctaatacgactttagaatcatgttagacgtaatttaaataattcttttgttatattggattcagctttattaagtattaagcatcaagtgttaagcattgataattaataaataagtaaaattgtggcttatgaactatcgtaagattgattttttgagctactcaacagtttttaaatactcaacaaacattagctgaaaacagctttattgtgaaaatgggaaggaaataatgaaactaaaatcacttactattgcgttagcactggctgcaacgagttctacagccctcgctgctgaaaaagaaggtttttatattggcgcatttggcgactattacgacaattcttgggaaaatgttcgtgattatccgccaggtggattgaatgttgatgactcaactggttggggcttagagttaggctatcgtttcagtgattactggagcgcgcgtctagaatatgcagacatggactttgattggactgcagatttagctaatggtacttcaacaagtggctctgaaagcggcgagcgttacggtattgatgctttatatcacttaggtggcggcccattctatggtatttttggtcttaagaacttaagtgctctagatgaaaacttaacgtttgctaacgttggtgccggttatcagcactactttacagacaatttcgcatttaacgctgaaacgtctttatatcaaggtcttgatcgtggttacactgatgttggcgctaaattaggtttcagctatattttcggtaaccaaagctcatctgagccagtagagcctgcgccggttgttagcgctccaactgatagcgataatgatggtgttatggatgctgatgatcagtgtgctaacacaccaatgactgatgcagtagatagcacaggctgtacattatacgaagaaaaagaagcaactatcaccttgttagttactttcccgcatgatgtagcagaagtaccaaacaaatacttcagcgatattgcagatgtggctgcgtttatgaaagaaaaccaagacacatcagttgtattagaaggccacgcctctgcagtgggtgatgctgactataatatgaagctttcagaaaagcgcgcacaagatgttgctgatgaacttatcaaagacggtatcgctgcagatagaatttcgacagttggatacggtgaagagcgtttgaaaaataaagcctacacactggaagcacatgctgaaaaccgtcgtgtagaagcgcaaattacaagcgttgaacgtgtaaaagttcttcgtaaataagactaaactattataaatatgtaaatactcctatatttataaatagttacaaatagtaaagccgagccaagtagttggttcggctttatttttttaattaaagaacataattatttttcgattaaataaaataatcttcagaatgtacctttttgttaaatgatagtttaagtgaatattgatttgaatcatcaaagtaactatcaaccatttgtgctatagcttttttagttaccttgtagaataattattaggtaatataattatttttactgtaatgtttttttagtatcaatattgttggatttatattgattctttttacgtcgctgtatttagttggtgttgttaaattaagaaaatttattatgttgtttgggtttattaagtttggattaattactcatcaactatcttgacggaatgtaggctacacggccttaagttatcttaaatggaagggaatgaaacatgaaactgaaaccacttacaattgctttagcgcttgctgcaacaagtgcctcaacaatcgcagccgagaaacaaggtttttatattggtgcgtttggtgattactacgataattcatgggagaatatccgtgattatccgccaggtggcctagacgtagacgactcaacagggtggggtttagagcttggttatcgctttagcgattactggagtgcccgcttagaatacgcagatatggatttcgattggaacgtgaccgacaacgatggaactacaatgagtggttctgaaagcggtaagcgttacggtatcgatggtttgtatcactttggcggtggcccattctacggtattttcggtttgaaaaaccttgacgctgttgatgaagatttaatgtttgctaacgtgggtgccggttaccagcactactttacagataactttgcatttaacgcagaaacttctttataccaaggtcttgaccgtggctacactgatgttggtgctaaattaggtttcagctatatctttggtgatcaaagcgaaccagagccagttgagccagcacctgcagttgtacctgttccggttgagccagttgatagcgatggcgacagtattccagatgcagatgaccaatgcgctaatactcctatgacagatgctgtagacgcttctggttgtacattatacgaagaccgtgaagtaacgaagagcttactaatcacattccctaacaatacatctaaagtttcacaacaatatttagatgatattgacagtgcagctgcattcttaaaagagcatccaggcactgatgttgtattagaaggtcacacttcatctgttggtaaagcagactacaataagtggttatcgaaaaaacgtgctgatgcagtcgctaagaagcttattgaagatggtattgatgcgatgcgcctaactacagttggttatggtgaagagcgtcttaaaaatccagctaacacgccggaagcacatgcagaaaaccgtcgtgtagaagcaaaagttaaagttattgaacgtgttaaagtagagcgttaatagttagactttgcatagagtttaaaacccagcctagtgctgggttttttgcttttaaaacacagataggaatgattcttaataaatattcatcagaatagcttttttttttagtactattcatgttatttatactgaatataaagtgcctaagcgcagcatggattttcatctatacttaaaagctttataattaaccgtcagaatactataagtactgggtaaaattgctatttagattaatagaaccgagtactttcacgtcaccaagagggcaatattgtgctacaagaatatcgtaaacacgtagaagaacgtgccgcgttaggtatcgtaccagcgccactagatgctcagcaaacggctgatcttattgaactaatcaaaaatccaccggcaggtgaagaagaatttatcgtagaccttcttgttaaccgcgtaccaccaggtgttgatgatgctgcttacatcaaagcaggtttcttagctgcagttgcaaaaggcgaagcgagctcaccacttgtatcaaaagaaaaagcagctgagctacttggtactatgttaggtggttacaacatcgcacctatgatcgaacttctagacgacgaagcgttagcaccaatcgttgttaaaggtttatcaaacacattattaatgttcgatgctttctacgatgtagaagaaaaagcgaaagcaggtaacgaatttgctaagcaagtaatcgaatcttgggcaaatgcagaatggtttgtaaacaagcctgcagttgctgaaaaaatctcagttaccgtattcaaagtaacgggcgaaacaaacacagatgacctttcacctgctccagatgcatggtcacgtcctgatatcccactacacgctttagcaatgctgaagaacgaacgtgatggtatcaaccctgacaaaccaggtgaagttggtccaatttcacaactagaagagcttaaaactaaaggtttacctcttgcatacgttggtgatgtagttggtacgggttcttctcgtaaatctgcaactaactctgtactttggttcatgggtgatgatattcctcacgtaccaaacaaacgcgttggtggtgtatgtttaggtggtaaaatcgcgcctatcttcttcaacacaatggaagactctggtgcattaccaatcgaactacctgttgatgagctaaacatgggtgaccaaatcgatatcttcccatacgaaggtgttgttaagcgtcacggcacagatgaagtaatctctactttctctcttaaatcagacgtaattcttgatgaagtgcgtgctggcggtcgtattccactgatcatcggtcgcggtttaactgataaagcgcgtgcatcactaggtatggaagctgaagatatcttccgcaaacctgcccttgtaactgattctggtaaaggcttcacattagctcagaagatggttggtaaagcatgtaacatgcctggcgtacgtcctggtcaatactgtgagccgaaaatgacaacggttggttcgcaagatacaacaggtcctatgacgcgtgacgaacttaaagatctagcgtgtttaggtttctctgcagatttaacaatgcagtctttctgtcatacatcagcttatcctaagccaatcgacgtaaacactcaccacacacttcctgatttcatcatgaaccgtggcggtgtatcactacgtccaggtgacggtgtaatccactcatggttaaaccgtatgttattaccagatacagtaggtactggtggtgactcgcatactcgtttccctctaggtatttcattcccagcgggttctggtgcagtagcattcgcagcagcaacaggtgtaatgccacttgatatgcctgagtcaatcttagtacgttttaaaggcgaaatgcagccaggtatcacattacgtgacctagtacatgctatcccttattacggtatcaaagaaggtcttctaacagttgagaagaaaggtaagatcaacgaattctctggtcgtgtactagaaatcgaaggtgttgagcacctaactgttgagcaagctttcgaactttctgatgcatcagctgagcgttcagctgcaggttgtacagttaaactttctaaagagtctatcgctgaatacctagagtcaaacattgtaatgcttaagtggatgatctctgaaggttacggtgatgttcgtactattgagcgtcgtatcacagcaatgcaagagtggttagctaaccctgagctgatggaagctgatgctgatgcagagtacaaacacgtacttgaaatcgacctagctgatatcaaagagccaatcctttgtgctccaaatgaccctgatgatgcacgtcttctttcagacgtaacgggcgagaaaatcgatgaagtattcatcggttcttgtatgactaacatcggtcacttccgtgctgcaggtaaactactagatggtttcagtggtcgtatcccaactcaactttgggttgcaccaccaacgaaaatggataaagaccaacttactgacgaaggttactacggtatctttggtcgtgtaggtgcgcgtatcgaaactccagggtgttcactatgtatgggtaaccaagcacgagttgctgataaagcaacggttgtgtctacctctacgcgtaacttccctaaccgtttaggtactggcgcaaacgtattcttagcatcagcagagcttgcagcagtagcggcaatcttaggtaaactacctacacctgctgagtaccaagagtatgcagataagatcaatgcaactgcagctgatacatatcgttacctgaacttccaccgtatgcctcaatacactaaaaaggcagaccaagtaatcgttcagcaagccgtttaattctaattaaaattaaatagctaaaaagcccgcatccagcgggctttttattttagataaaaattctaatttacttctaaattcgatcttaaagctacataaatcatcattgctgtttacataataacgcaaaaatttcctaccaattgcattaaaatcctcgccaatattctcaacatattaaggcgagatcgttatgacaaaattaaacaaccagaatctattgcaacttcgttttgtaagccaagctcatattgacgcagtaaagccttcttttgctaacctacctgcgaatccgtacgccgatggtcaatttcgtaagcgtcgctattcagtaatcaaagtctttgatggtgaattaaagctacaaccaactaaagcatttgtgcaagatgactcaatcaataccttccaaggtaatgttgagcgtacttatgagaatttagaagatagcttattagccactgatggcatgaagcaaatcgttaatcagttccgcgatatgacggggatcagcgatgatcgcgatattgaaattcaccaattcagaatgcttgcgattgacagcgatacacccgctgcgcctgaaggtgttcaccaagatggttttgatcacgtatgtgtatgtggtgtatcacacgaaaaccttgaaggtggtgagctacttgtttatgaacatcagcaagcagagccttgtttcaaaatggaaattaaagacggcatgttcgcgcttattaatgaccgtgaagtatggcacaacgcaacaccaatgaataaactagacgcaagcaaagaaggttaccttgattgcttcgtactaactgcgtaagggtatatcatgaacttaacgcaattacgtcgtcaatttcctgcacttatgcaacaagttgctggtcagtcaccgattttccttgatggcccgggtggctcgcaagtgccacagtcggttttaagtgccatgactgcttatttgggttactacaactcgaacttaggtggtgcatttttctcaagtgataaaacggttgagttaatggctaacgctcgccaagcagcagccgatttattaaatgcctcatctaaagagcaaatcgtgtttggtgcaaacatgacaagcttaacgttcagctttagtcgtgccatctcgcgtgattggactgctggtgatgagattattgtcaccaatgccgatcacttctcaaacgtatcatcttggcagcaagctgctgaagataagggtgcaacagtaaaaacggctcttatcaatgaagctgattgcagcttagatatggcacactttgaaagccttttatcaagcaaaacaaagcttgttgcagtgacgtatgcatcaaacactactggttcaattaatgacattaaacgcattgttgagcttgctcatgcagttggtgcgctagtttatgttgatgccgttcattacgcacctcatgagctggtagacgtacaggcacttgattgcgactttttagcgtgctctgcatacaagttctttggccctcaccttggtattgtatatggcaaacgtgagcaccttgaaggtttcacaccatacaaagttgagcctgcaaaagatgttgccccaggtcgctgggaaacgggtacgcaaagctttgaagcgctagctggtctcattgctgctgttgattacattgctgcaattagtgagcttgatgacagtcattcacgccgagaaaaactggcggctgcatttgctatgactaaacagcacgaaatgacattaagtaagcatttcttaactcgtttagcagattacccgagcattaagctgtttggtattaatgatctagagcgtgttgctaatcgcacaccgacttttgctttaacttttgaaggcgtcgagccgcgtgttgtttctgaatttttagggaagcaacatatttgtgtgtgggatggtaacttctacgcgcaaggcttatgtaaacaactcggtgtattagagacaggcggcgtagttcgcattggctgtatgcattacaacacaattgaagagcttgataaggtttttgatttatttgatcaattactaaaaaattaaagctaagtttttagctataagtttgaagcagcccgaaggggctgctatttgacagagctaacagtcagttggatttttaccgctaggattgtggttgcccatagatttgctctgcacggttaaatagaacccacgacgttaaaatatacttatcatttgaaatgggcttattacctcggtgcgtatgagtaaagtaacccggtgctatgaccatagaaccctgcttcggtgatattttacgctgttgatagtaaaactcagtttcaccaccttcttctacatcatttaaatagaacataaataacagtacgcgatgcaaggcttcgttatgaccgtgttgtgggtatacctcgctatgccaatacgggtagccccctttattgatatcgtatttttgtgcttgaataggcccgaggcggaaaatttgctgcacgagtaatggcaattgtggtttgccaacttcttcaaaattatcttgtgtaagatcaactggctgacctgttttcggatgatatacctttaaaccaaatgcacctatcatcatgaaaatatgctcttcaaggtatttaaagatgtggctggcggttgtttgctgaatatgcttaagttgctcaacgtactctggatgattattaagatataaatcgcggctgtctttttttgctaaatctacgccgccagaggtaatgccttgttttaaatgcgggctttgttcaaataccgtgataaagttgtcgcaaaattctttgctaagggcgttttcgtatacgcgaataaagtccgtcatgagctacctttagtttatattttttatagggttactatgtttactgagactatcacacctcgttttagcgaaactgatgtgctagggcatatcaacaataccgtactccctgtatggtttgaagccgcccgagcgcctattttcaggttttttacccccgatctaaacccctatgagtggaaattgatcattgctaaggttgaggtaagctttgtaggagagttgttttatggccacgatgtaactgttaaaaccagtgtagagcacatcggctctagctcatttgtgcttcgccaagaagcatggcaacaagataactgctgcgccgttggtaaaactgtactcgtgcgttacgactttgcaaacaaatgctcgcaaaaacttaatgagcaggaaagggctgaccttacagcgcatttaatcgctgaggaataaaccattttttgccgacatttcgcagcacttgggttaaaatgcgccttcattattttgactgagtaattttgggttacacgcaatgctgttaatgatcgacaattatgattcgtttacctacaacttagtgcagtattttcagcgcttagatcaagatgttttggtaaaacgtaatgacgagatcagcattgcagagatcaaacagctcaatcctgaacatattgttctttcacccggcccatgttcacccaacgaagcgggtatttcgttacaggtggtcgaacagctaaaaggtgaagtgcctattcttgggatctgcttagggcatcaaactattgctcaggcgcttggggctgaagtagtcagagcaaaacgagttatgcatggcaaaacttcattggttaaacataacaaccaaggggtgtttaaggggttagcaaacccacttaccgtttgccgatatcattcattagtggttgataagcagcatttacctaatgaccttacaatcactgcttggactgagcaaaattctgatttcgaagaaataatgggtttaatgcatgctaatttagcgcttgaaggggtgcagtttcatcctgaagcaattttgactcagcagggacttgaattacttgctaactttttaactcgcttctaatcttaggctaatgaattaacaaatatgactgacaatacccctgtgcaaattactgaagaaaaacgacaacaaaggacttcgatggtgctcaatgaacgcgcccacgatctattgcttggtcatagttttgcacagcgccaaattggttatattcacaccttagagattgactacggtgagtcgatggagcaacgcactttattagaggtggaagttgcagccgaaaagaagcgacaaaaaagcagtacagcacatcataagtaccgtgctcaggcgagtaagcagttacatcaagtcatagaagcagctatgaacaagcaacttgaagacgttgactcggttgtccatgaaacaattggtattcaagatagtgttccagcgattttagaaatattagcagtacgctctgcatcggttggtcgccttgaacctttagttaaagatttaagttggttaggccgcgagttggttgcctttgttaatttgcctttctatcgtaagcagcgtaacaagcatacctcggttcaagttgataacccattattagcgctgcgttatattggtttagataatttaaagtttgttgtgcctacatttgcggttcgccattggatgcctcacagtacagaaccatttccattattaaagcgtcgtttgcgcgataattcgatggcgtgtgccattgcggctcaagagcttgctaaattaaatggtgtaaacgaggtgcacgcgtttaccttaggtatgttattggatgttggcaaaattgctttagtgcgtttgtatttacgcacctttgagcgagtttggcagcgacaagtggcaaaagcgcgtgaagaacaaaagaaagacttacacacggcacttttagagcttaagccagatcccttgtttttaagctcattattgagaactctgtcaatgaaagtgaccgctactgttattgagcaaatgtcatttaagtatttaccctttaatgcggtgatgcagcaattaacaacgccactagctaaaaacgatgagtacctaccacttacagaagtgatattaaaagcgcgttgttatgctcaatacttaagtttaaatgagcaccaattagttgaacaagacgaaactgagcattggtttgcgcactttaacttcactcaagaagagctcgatcagcttgcaaaatgcaattttgatcgcttccatatccaaattaattaaaaaaaatgttaatttttttgcgactattcattcattgtttatcaatccacactgacaatttttctgtaagcatgttctgcggtgcttactagcagcacgcctttttatcgtatttagtctaaaaaacaaccttcaaatagttattcactatccatgaaaaaatatctcgagccctttattttcaagggctacatgaaagttttctaagagacagaacgaaaattttctgaaataatgaacgaatgaaaattgaaccaaagagtaattttggtgaatttacgctaagctcaatcggctaattaaaatggcttagtttagctttaagatgccaccttactcttcgtgtgcttacaattaagaggatataaaatgacagtcaatcgtgaattatttgatcaagtaatggttcctaactatgcaccatcaagtgttattcctgttcgaggcgaaggctctcgtgtatgggaccaagaaggtcgcgaatttatcgattttgctggtggtatcgcagttaactgtctaggtcactgccatccagctcttgtaagtgcattaaaagagcaaggcgagaaaatttggcacttatcaaatgtaatgactaatgagcctgcacttcgtctagctaaaaagctaactgatgcaacatttgcagagaaagtatattttgctaactcaggcgcagaagcaaatgaagcggcactaaaattagcgcgtcgttttgctcttgataactatggcgagcaaaagtcgcaaattatctcattcaataaaggtttccacggtcgtacattcttcactgtaacggtaggtggccaagctgcatactctgatggttttggtcctaaacctggcgatatcgtgcactgtgactataacgacttagcagcattcgaagcgcttatctctgataatacgtgtgcggtaatgatggagcctctgcaaggcgaaggcggtatcatttcaccaacgaaagaatttgtagaaggtgtacgtgagctgtgtactaaacacaatgcacttttaatttttgatgaagtacaaacaggtgttggtcgtactggtgagctttatgcttatcaaggtttaaacgtaactccagatatcttaactacagccaaagcgttaggtggtggtttcccaatcggtgcgatgatcaccacaactgatattgctaagcacttaaaagtaggtactcatggttctacttacggtggtaacccacttgcatgtgcagtagcagaagcggcattcgatacagtaaatacaccagaagtattaaatggtgttaaagaaaagtcggcattattccgtgagttactaacggcgattaacgaaaagcacaatgtattcactgaaatccgtggtgaaggcctattaattggtgctgtagtaacagagcaatttaaaggtcgtgcaaaagagttcttagttgcagcaacagaagaaggcgtgatgtctttagttgcaggtgttgatgttgttcgtttcactccgtcacttgtaattccagaagctgatatccgcgaaggtatggctcgttttgaaaaagcggttgctaaagtcgctaatagttaatttcttaactgccaactcagggcaagcacagcttgcccacatttcttaatttaccgttatttataagggagcaagcggacttatgatgatccttcgcccaattcagcaaagtgattacgcttcattagtaaagattgccgtagagtcaggacatggcttcacatctttgcctaataatgaacaattgctacaaaagaaaatagatcattctgtcagctcatttgcaaaagctgcccaacaaccaggtgatgaaggttacttgtttgttcttgaggatagcgagactggtgaagttgttggtacttctggtatcgaagcagctgttggtttagatgatgctttttatcactaccacttaagtaaagtgattcactcttctcggacccttgatgtatacaaagctgttgatattcttaccttgtgtaatgattacacaggggcaacagagctatgcacgttattcctaaaagatggctaccgtaaaaataataatggtaaattactctcaaaagcgcgttttatgtttataaaccagcatagagaacgctttgctgaaactgtgattgctgagatgcgtggtgtatcagacgaaaacggtgaaagcccattctggcaatggttagaagagcactttttttcaatggactttcctactgccgactacctcaccgggattggtcaaaaggttttcattgctgagttaatgcctaagtatccaatttacgtcaacttattgagcaaagatgcgcaagctgtaatcggtcaagtgcacgctaacacgcgtcctgctattgaacttttaaagaacgaaggtttcacctttaacggttacgtagatatctttgacgcaggcccaacagttgaagcaaagatcgaaaatatagctacaattcgtaatgccaaaacattcaaagttgaaattggtgaaagccaaggcgacaccacggtattgttagcaaacgataaaattgctgattttagagcaaccgtgactcaagttagcctaccatgcgatgccgatagcatcacaatctcaagtgaattagcaaaagcacttcacctagaagcgggtgattcagtatcactagcagaactatagaattcaggagacatattaatgactcatgcagcgcaatttattaatggtcaatggcaagcaggccttggtcatacttttcagtctgttaaccctgcaaacaacgacgtaatttggcaagcaaacagtgcaacagctgagcaagtagacagtgctgtgtctgctgcacgtgaagcattttacagctgggctgacaaatcatttgctgagcgtttagcgattgtaaaaacatttgctgaaacgctaaaagagcacagtgaagaactcgctgttgcgattgcacaagaaaccggtaaaccactttgggaaacgcgtactgaagctggtgctatggtgggtaaaattgctatctctgaaaaagcatttttagagcgtactggtgatgttgaaaacccaatgccgcaaggccgtgcgatgatccgtcacaaacctcatggtgttgtcgcagtatttggtccatacaacttccctggccacttaccaaatggtcatattgtgcctgcattattagcaggtaataccgtggtatttaaaccgtcagaattaacgcctgctgttgctgagttaacgttaaagttatgggaaaaagccggtcttcctgcaggtgttatcaatcttgtacaaggtgaagttgaaaccggtaaagcgcttgcgtctcataaaggtattgatggcttattctttacgggctcttctcgtactggtcatattttacatgagcagtttgctggtcagccgggtaaaatcctagcgttagagatgggggggaataacccgcttatcgtcactgatgttgctgatactaaagcggctatccacgatattatccaatcagcgtttatctcaaccggtcaacgctgtacctgtgcgcgtaaactgtttttaccaaaaggcgagcagggtgatgctatcttagcgggtcttattaaagcgactaaagcgattaaagtaggtgactacgacgcagaagatcagcctttcatgggttcaatgatttctgcggcagcagcagctggaatggttgcagcgcaaaagcaacttgttgagcttggtgctgaagtgttagttgaacttactcacaaagaaaataccggctttgtaacaccgggtattttagagtgtaccgatgtggctaacttcccagatgaagagcactttggaccactgcttaaagtgttccgctttactgactttgattccgctattgataaagcgaatgacacaagctttggcttatcagccggtttattaagtgacagcgcagcagattacgatcacttcttacgtcgtattcgtgcaggtatcgtaaactggaaccgtccaatcacaggtgcatcaagtgcagcaccatttggtggtatcggtgcatcgggtaaccacagagcaagcgcatattacgctgctgattattgtgcataccctgttgcttcggtagagcttgaaaaagtagcgatgccagcgacattgagccctggcttaaaaatcgattaataaccgtaaattattataaaaagcagcttgagctgctttttttgtatgagatgtctagcaaaggtagcaattaaaagcgctttctgcttaaatctaaagagatagttttttattaggtgtgcagtcgtatggttttagataggcaagggtacgatgatcttgtcatgtatctcactcaaaatttagcgctttttgagaagccaggtcaaattaaaccaggagctccaacagtgttagagctgattgaagacgtgatagcagaaaacgttatgttactttgcgaacaacacactgagcttaatactgagcaacgcagccaaattgtccgcgaagtagatggcattgtgtatgacttacaagaagtgttaagtagcgttacaaatcacactgtaaccgttgagcagcatgcttttattgatgagtttgctggactggtaaaaaacttatttgataacgccgtggctgaaagcgcttaacggccagtgttagcgctctttttaagttcgcaatcagcgtgcttgcgcttgcagctgcaaatcctcaattaactgctttactccttggcctaccgcttatctcttgcatctgagtgtgacttgcttacaatcaagcaaaacaacttgaagagacaaaataaatgcaagcgaatgtaaaatgggtagagggtgataccttcattggcctttcaaactcaggccacaatgtcgtttttgatgctggtagcgatagcgcagcaccaagcccaatggaaatggtattaatgtcggcaggttgctgctcatcggttgatgtagtaagcattctaaaaaaagcaaagcaatcattctctgatgtgcaagtgaagctaacagctgaacgtgctgagtctgcacctcgcgtgtttaccaagattaacctacactttgtggttaccggtgataatgtctctgaaaaacaccttgcgagagctgtgcaattgtctgcagaaaagtattgctctgtagccttaatgcttgataaatcagtagaaattacgcatagccacgaagttgttctagaacaggtaaaataacgctttttccgagcgggaaattcgtataaaatccgcgaacttttatttctgctggtgcaggtttcactcgtttaaaggttggtttagcatgaataaacccttcgataaaattaagcttcatggctttaataacttaactaagagcttaagctttagtatttacgatatttgttacgcaaagactgaacaacagcgtaaagaatatattgaatatatcgacgaacagtatagtgctgatcgccttaccgatattttaggtgaagttgtggatattattggtgcaaacatcttgaatgtttctcgccaagattacgatccgcaaggtgccagtgtgacaattctgatctcagaagagccaattgagcagcaaactacctatgacgttgatgaagcgccgggtcctttgcctgaaacggttgttgcgcacttagacaagagccacatctgtgttcacacatacccagaagcacatcctgatgatggtatttgtacgttccgtgctgatattgaagtatcaacgtgtggcatcatctcgccattaaaagcgttaaacttcttaattcacagccttgagtctgatgttgtaacaattgactaccgcgtacgtggttttacgcgtgatgtggatggtgttaagcactatatcgaccacgcaattaactcaattcagaactacatgactgaagatacaaaagaagcgtaccaaatgatggacgtaaacgtgtatcaagagaacttgtttcacactaagatgatgctaaaagaaactgacttgaatacttatttattcggtgtttctacagcagatctttcagaagacgaagaagaagaaattcgttctaagttaactcgtgagatgcaagaaatcttctatggtcgtaacttaccagacacagagtaagtagccacaagcttaaaaaaaacggcgtgtaatgtatgttacacgccgttttttatttcaggcttagtgttgtggcagtcgtaactgcgaaccctcagttacttaataagtagcaactctgtttgtctgccatcaagataccaaactccagagctatcaaaaaaagcatcttcttcgagcataatacggatctctttgttccaaggctctatatatacagcattatttaactcaatcgaatacgccgtatttaagtgaagcgggtagtcaccatcgccagcaacaccttgttgagaatcccacatgcccaatgttgtacctgctgcgtggccatgataaccaattgggtgcgtgtagattgttggctttaatcctttagcaattgcctcggcgcgtgattctttcagtacttcgttaccggttttaccgattgcaaaatgtgaagtaaaaatatcttgcaattgattaccgcgttttaatgcgtttattaaatactcgggtgcttgtgtttcattttcttttaacacataagcatgttgttgagtgtcagtatttaaacgcaaataggtaataccaaaatcaacatgcagcagatcccctgcttgaatgatttgctcatcaccttcactaaaactggtctcatggtcaaaagttgttttatcggcacgttgtatactgacgcttgggtgaaaccatgtttgcagttttaattcccttacccgctctctaaaccaccaagttaaatctgtagttgtagttttaccgacagtgatgactttacttgaaaacccctcagcaataattcgatgcgcaatggcgaccgcttttttatacattgctatttcttcaggtatgcgttgttctagccaagctaccgcgaggggctctgcagaaatcagtttattaaggtatttatttgggagagcacttttaagtgcattaaaatcgctaacaacgagtccatctgcgtgagcccagatttttgatgtgttaagtgcgatatttttgggttgatattgctcaatcagttcaactaaggctaaccattgatctggctgctgttgtttgtcccatgcttttttaaatacagtgcctatgctgtagggcgctattgcgagtgcgtcaacttcgccttgtttattgagtgcaaaaacaagtatggttgttcgccttgcagaaagccaagttgccggtagaaaggtttttaaaataggatcttcattgtattcgcggctaatcataagccacatatcaatattatgttgcttcataagcgagggcaaaagcgttttaaccctaagctctgtgactttatctataaaagcagcgcgttccttcattggtagaaccgataattcactcgccttaatgggcaatgcccaccagctacatagtattagcgctagcatgatgtttgttttatttagcacgttgttgtttcctttattatttttataaactgcttaaaaacatagcaacactctatacaataaacgagtaatttaaggtgaattacaggtttctatgcgtaaactcgcttgctaaagtaaaggtgtagattgggaataaagttaaggataataatgaatcagcaggtatttttagcaaaacaggttcgtgaaaatgaaggcccagcagctaaacggtgtggtgtaacactttatgagctaatggaacgggccggacaagcgacttatcagcatctacttaacaactttcctgatgctaaaaagtttgttgtattaactggcgttggtaataacgctggtgatggctatgttgtggcacgcttagctaaacatgctgggatgcaggtgacggttatagcagcaaaacctgagcaaccccttaaaggggatgcgctcaccgctcagcaagcttggttagaattaggtgggacaattactgcagatctaagccccattaaaacagctgacatcatcattgatggcttgctcggcacgggtattcaaagcgaggtgcgagagccattcgcacaattaattaaagcagccaacgaaagccaagtgccagttgttgctattgacctcccctcaggcattaatgcagacacaggtgtagtacagggagttgcaataaaagcagcgctcaccgtcacctttgtgggaattaaacaaggtttagtaactgggcaaggacgagcacatacaggagagcttgagcttgcagacttagctattcaagatgcctttttacaattgacgacacctactgcagagctaatcaattataaggccctgtcgaggcttcccaagcgcgataacaacagccataaaaccagtcatggtaaattgctgtgcattggtggtaatgctggcaccgcaggcgcaattcgtttaactgcagaagccgctcttcgcacaggtgcgggcatggttaaagtgtatacccatagcagttctattctgccagtgagcattgggcggcctgagattatggttaccgatacacatttaattagtgcgctagaatgggcgagttgtattgctattggtcctgggcttggactggacgcgtggtccgaaacaacctttgaaacggtcatgcaatattgctttactaataataagccattggttattgatgctgatgcacttaatttaatagctcagcatgcttcttcatttccattagccaatacggttataacaccgcaccccggtgaggctgcaagactgcttaattgtcacgctaacgatattgaagaaaatcgctttcatgcggtaaagcagcttgcacgcagctataccactacttgtgtactcaaaggtgctggcagtttaattgcagacaagaaccaaacatgggcgtgtacagatggaaatcctgcacttgccgttggcggcagtggtgatgttttaacaggtatcatcgcggcacttatcgcacaggggctaactacccagcaagcagcctgcctaggggtctgcttacatgcgaaagcgggtgatatcgccgctgagcgcgatggtgagcgtggtatgttgccaagtgacttgtttgcgatagtgagggagttggttaactgagtggtcagtaattgatagctaaaagaaaacccagccgaagctgggttttttaagcaagatttttgggggatgattacatcatgccgcccataccacccatgccgcccatgccgcccatatcaggagcaccagcgtcatctttagggatttcagcaaccattgcttcagttgtgatcataagacccgcgattgaagctgcgtactgtagtgcagaacgcgttactttagttgggtctaagatacccatttcgatcatgtcgttgtactcgccagatgctgcgttgtaaccgtagttaccttcaccaccttttacagagttaacaacaactgatgcttcgtcacctgcgttcgttacgatttgacgaagtggtgcttccatcgcacgtagtgcaactttaataccgtggctttggtcttcgttgtcgccaactagctcagcaagtttgcttgctacgcgaactagtgcaacaccaccacccggtacaacaccttcttcaaccgctgcgcgagttgcgtgtagagcatcttctacgcggtctttcttctctttcatttcgatttcagttgctgcgccaactttgattactgcaacaccgccagctagtttagccatgcgctcttgtagtttctctttatcgtagtcagacgttgcttcttcgatttgtgctttgatttgtgcaacacggccgttgataccgtcttcttcacctgcaccatcgatgattgttgtatcatctttagtgatcacaacgcgtttcgctgtacctaggtcttcgattgttgctttttctagctctaaaccgatttcttcagaaattactgtaccaccagttaatactgcgatgtcttgtagcattgctttacgacggtcgccaaaacctggcgctttaactgcagaaacttttacgatgccgcgcatgttatttacaacaagtgttgcaagcgcttcaccttcaaggtcttcagcaataattagtagtggcttgctagctttagcaaccgcttctaatgtaggtagtagctcacgaatgttagatacttttttgtctacaagtagaatgtaagggttgtctagctctacagcgcctttttcagcgttgttgatgaagtaaggagacaggtaaccgcggtcaaactgcataccttcaactacgtctagttcgttttctaacgactgaccttcttcaacagtgataacgcctgaatcacggccaactttttccattgcttctgcaatgatgtcaccgatttctttatcagagttagcagaaatagtacctacttgagcaatcgctttagtgtctgcacatggtacagaaagcgctttaagctcttcaaccgcagcagtaactgctttatcgataccacgcttaaggtccattgggttcatacccgctgcaactgcttttaagccttcgtttacgatagcttgcgctaatacagttgctgttgttgtaccgtcacctgcagcgtcattcgctttagacgctacttctttaaccatttgtgcgcccatgttttcgaacttgtcttcaagctcaatttctttagctacagacacaccatctttagtgattacaggagcaccgaaagatttgtctaatacaacattacggcctttaggacctaaagttactcttactgcgtttgctaaaatatttacgccagttagcattttgctacgtgcgtcacctgcaaaaagtacttcttttgctgccatgatttaattcctcttaaattctgtaaacgggttgctaaacgaaaagtaggattagcctacaatgcctagaatattatcttcacgcatgatcaggtactcttgaccttcgatcttttcagctttttcaacataagagccgaacagcacagtgtcaccggctttaacttctaatgctcttacttcaccgttgtctaaaacacggccattaccaacagcgataacttctccgcgagttgatttttcagctgcagagccagttaatacaataccgccagcagacttagtttcttcttctagacgcttaacgatgacgcgatcatgtaaaggacgaatgttcatttatttagttctcctaacagtttctgaacagtacagaaaaaatcttgtgttattgcaggggagtgctaagccacccgttgcgtttcattgccttcattaatgggggtggcttaaaaaaatccaagtacaaaaattaaaaaattttaatcttttcgctcaaattcaccatcaatagttgtcggttgatgagttggctcttcgtgttggggtgctttactgtggtattgaaagtgtgcagagccttgattcgcttgtgaactcatacgcacagttgcatggctggcaaggcttgtagctaatttattacgtattgctggggtaagtaataaaaagccaaaaaagtctgtcattatgccaggagtcattaataacactccggcaataatcacacacaagccagtaaataattctttcgcaggcatttgcccttgcgccatttgtagttgcacattttggattgctcccatgccttgctgcttcactaatttggcaccaacaatggccgtgacgataactagcgctatggtggcaaacccgccaatgacttcactcacttgaataagtaaggcaatctccactatcggcactaaaataaataacaaaaacaaaaatctaaacataacgctctctaaaaatgtcactctctttggagtcaatgaaatataagttggggtgatcgggtcttttttcaagctggagccatggatcacctagctcgctacacattattgctgctatcagctactatggtgcgactcacgtgatcaaaaaaaggttccttatgaatacgcattatcgactgatttttactacttgtgcgaatgaagctgaggctcgtcagctggctcaacacctagtgaaagaaaagctagctgcctgtgtcaatattctgcctactatcgaatctatctatatgtgggaaggcgagttaacgcaagcgacagagagtaaattactgatcaaaactaaatcagaaaaaatgaatgaggtgatccaaactatcaagaaattgcatagttatgaggtccctgagattcaggtcgttgatgtagcaacaggcaatttagcctattttaattggatggatgaggtacttaattaatgcgatcgttccttttattactttgcgcactgtggttattgcctgcaagcgcaagtaatagcaatttacttggtaatttactgcagcaaccggcagaacacacctttctccctgttgataaagcctttgtttttgattttgatcagcaaggtaaaaccttattcattggttgggatatagcgcccgattattatctttataaaaagaaagtcgaaattattgccaagggagccgatatagaagtgcctgagcttggtaaaggcgtcattattgaagatgagttttttggtaagagcgaagtattttttgattcattaagtgtgataacaaaagtaagcaacatcacagatggggcagttgttaaagttcgttttcaaggctgtgccgaagcggggttatgttatccgccagaagtgagaaccattcctttatctgtgattgctggtgagcaagtatcgcaaactgcagatactggcaatgcattggctgcattaacacaagccgcagaggtaaatggcgcatcatcagcgccttctcaagaagtatcaaaaccagttggtgagcagtcatataccgataaactagcgtcacaaggtttactaacgaacctagttatcttctttttagtcggtgttggtctggcttttacaccatgcgtattcccaatgtttccgattttgtcgagccttattgcaggtcagcagaatttatcgactaaaaaagcgttttcgctgtcgtttgtttatgtgcaagggatggcagttacctatgcagcactgggcttagtggttgcatcattaggtgggcaagtacaagggtatttgcagcatcctacagtactaattagctttagtatcttatttgtattgctagcaatgtcgatgtttggctggtacgaaattaaactgccaagcggcatgatgaataaactcactcaggttagtaaccaacaaaaaggcggcaactatgttggcgtatttatgatgggtgtactgtctggcttgattgcttcaccttgtactactgcaccgttgtcagctgcattgctttatgttgcacaaagtggtgattatttagtgggaggtttaactttgtatgtactgagcttaggcatgggactgcctttattattgctaggtacatcaggtggtaaactacttcctaaagccggtggttggatggaacaagtgaaaacgttattcggtttcattatgctagttgtgccgctaattctgctagagcgtattgttgatatcgagatcatttggttaatggctggtttattagcacttgctacagccttgtacttacatcattggcaaagtggtcaatcgcaaggtaagttaaaaacagcattatggtttgctgcaaccttactggttgtgactggagcgagtttaacgaaaagttatttttggcctactaaagcggcggttgcacaagctgaagtgcaaacacatggctttagacaagttgctaatttaagtgaattgaaagaagagattgcaaaggcaagcagcgaagggcgcttagcaatggtcgacttatacgctgactggtgtgtcgcgtgtaaagagtttgaacactacacgtttcctgatgctaaagtacaagaacaatttgcgcactttgagttaatccaaatcgatttaaccgaaagtgatgcaaaaaccattgagctaatggaagaatacacggtattcgggttacccagcattttgttctttgacagccaaggtaatgagcttttagagcaacgtgtaacaggctttttaaatgctaaagactttgcagaacatctggcaaaagtgcgaaatactgctaaataaacgcaaacgtgctagaaaatagcaaaacgccactcatctgagtggcgtttttgtttctcactaagaaaaagtactcaaactaaaagtaaatgagtgatttttgttgtaaaagttcaattaaacagtaagagaatacagtgattaaccctgttgtgtgccttgctatgcctacatttgctttgtgctatgagtgattagaccagtattttgctgctatttacgtcgaaatatctataataggtggttaacgtgagaaatagttgctattttacatcgatacgcttaggttaagcgtgggtttatgatgaatatggttaaactgcttacttaaaggatatatcgcgtattatggctgcaaaattcaaacttttagttcttaatgggccaaatttaaacatgcttggcaagcgtgaaccagaaaagtacggcacccaatctcttgatgagattatcgctgaacttagtcaggttgctgcgggtcacaatgttgatttaacgcattttcaaagtaacagtgaagctgcattaatagagcgaattcacgatgcatggcaagtggttgatgcaattattattaaccctgccgcatttacgcatacaagcgttgccttacgggatgcattactcagtgtaaacattcccttttacgaggtgcatttaagtaatgtgcacgcacgggaggcatttcgtcatcattcgtatttttcggatgtggcacaaggcattatcgtaggattaggagcaatgggttataaagtagcacttgaagctgcggttagccggttgcaaaacacacattaattttaaataaaacttacaggcgggtcgttcatggatattcgcaagatcaaaaaacttatcgaactagtagaagaatctggtattgctgaattagaaatcactgaaggtgaagaatcagtacgcattaatcgtaacaacatgagtgcagcgcctgcaatgcagtatgctcctcaacagtacgcagcgcctgcaccagcgccagcagctcctgctcctgcagcagaagcgccagcggcagacgcagcaccagcagcaccaacaggtcatcaagttaaatcgcctatggttggttctttctactcagcagcttctcctgaagcagcaccttatgtagaagtaggttcaaaagtaaatgttggcgacacgttatgtatcgttgaagcaatgaaaatgatgaaccaaatcgaatctgataaagccggcacagtaaaagctatcttagttgaaaatggcgagccagtagaattcgatcaacctttattcatcattgaataacagcgcaacaaaaggccaactctatgttagataaagtagtcattgcaaaccgaggtgaaattgcacttcgcgtactgcgcgcctgcaaagagcttgggatcaaaactgttgctgtgcattcaacggcagaccgtgatcttaagcacgtgttactggcagacgaaacaatttgtattggtaaaccggcagcaagtgaaagttacctagatattccgcgcattattgcagcggcagaagtaacagacgcagttgctattcacccaggttatggtttcctttctgaaaatgcagactttgctgatcaagttgagcaaagtggctttgtatttatcggccctagaggcgacacgattcgtttaatgggtgataaagtttctgcaatcgaagcaatgcgtaaagcgggtgtaccttgtgtaccaggttctgatggcccattaacggcagacagcgagcgtaacattcaaattgctaagcgtattggttaccctgtaatcattaaagcagcaggcggcggcggtggtcgtggtatgcgtgttgttcgcagcgaaaaagaactaatcgattcaatcgctcttactcagcaagaagcaaagcaattcttcggtaatggcatggtttacatggaaaaattccttgaaaaccctcgtcacatcgaagttcaagtacttgctgatggtcaaggcaatgcagttcacttaggtgagcgtgattgttcaatgcaacgtcgtcaccaaaaagttgttgaagaggcaccagcgccaggtatcactgctgagatgcgtaagttcatcggtgaccgttgtactcgtgcatgtatcgaaattggttatcgcggtgcaggtacgttcgaattcttatatgaaaacggcgagttctatttcatcgaaatgaatacccgtattcaggttgagcacccagtaacagaaatggtcactggcgttgacttaatcaaagagcagttaaaaattgcagctggccaaccattatcattcactcaagaagatgtggttattcgtggtcacgcaattgagtgtcgtattaatgcggaagacccagaaacatttattccatcaccaggtaaaatcacgcgattccaccctgctggcggtttaggtattcgttgggacagccacatctatgcagattacacagtaccacctcattacgattcaatgattggtaagctgatctgttacggtgaaaaccgtgatgtagcaattgctcgttcacgcaatgcgttaaacgaattagtgattgatggcatcaagaccaacacgccactgcacaagaaaatcttggcagatgagaacttccaaaacggtggtacaaacatccactaccttgagaagaaactcggtctgtaaaaaaattctgtttaagctaaaaagccggcaactttgccggcttttttatgtcaaattaggcataagagcggctctcgccttataaaaattatctggtatgattaacaaagtaatgtgtttttagtttttcatgaggtaacaatgaccgacagtgttggttttccactggctgatgaagctgcaacggtaaatatgggcaatcaacttgcagcgttgatggaacaaggggctgtcatttatttgcacggtgatttaggtgccggtaaaaccacattaacccgtggtatcgtgcagggttttggtcatcaaggaaaggttaagagtccgacatatacactggttgagccttatcaactaactaaagctgatgtttatcactttgatttatatcgtttaggtgatcctgaagagcttgaatatatgggcattcgtgattatttttcgccacaggctatttgtgttgttgaatggcctgagaagggaggtgaatttatcccaactcccgaccttgatattactttgcgttatgacggtgaggcacgtgctattgttattaatagcttaactaagcgcggtcaatctattgtcgaacaattgaagagcgtgtaagaataaacatataaaaataaaggtgtactagtaaaaatgggtcgttgtacgtttaaactattaactattttaatgtttttggttgtgagccaggttgcgcttgcacaaaatactattaatagcgtacgcgtttggccctcaccagatagcacccgtgtggtatttgatctagatgaaaagcctgattacagctatttcatgctgaaaaacccagcgcgtttagtcattgatctaaaagatactgataagctcgataacttgcctgctattccgcaaaagcatcaaatagtttcaaaacttcgttactcaaagcctaaagatagcaaaagtgtgcgttttgtttttgaactagcacgcgccagtaaacctgtggtgtttgccttattacctaccgagccatacaagcaccgtttagtcgttgatctcatcgacaaaacatcgaaagctgagcctattgctgcaacgaataccagcgttaaaaagcgtgagctacagcaagagcgcgatatcgtgattgccattgatgcaggtcacggtggtgaagacccaggctcaattggtccatcgggtacttatgaaaaagacattacgctacaaatagcgaagcgcttagagcgaatgattgatgctgaaaaaggcatgatttcgcgtatggtgcgccgtagtgattattttgttaacttaaatacgcgaaccagcattgcccgtgagaaaaaggccgatttctttgtctcgattcatgccgatgcgtttactagcccgcagccaaacggtgcctctgtgtgggtgctctcactgcgccgagctaactcagaaataggtaagtggattgaagataaagaaaagcactccgagcttttgggtggtgccgctggggtattaaaagataccgcgagcgaaaaatatttagcacaagcactgcttgatatgtcgatggatcattcgatgaaaacaggttttagtgttgcacaagaagtagttagcgaattaagaaaagtagctaaaatgcataagaagcaaccacaagcggcgagccttgcggtattaaaatcaccggatattccgtctattttggtcgagacagggtttatttcgaatccgcgtgaagagcgaatgctaaaaacggcgcagcatcaggagcgcttagcgaaagcaattttcacctcaattaaaaattactacatgcaaaatcccccagatgactcgttatttgcgaaattaaaagcgcaatttccaactaagcacagagtacgtccgggtgagtcgttaagtattttggcaagcagatacaacacctctgttagtaagctaaaaacggtcaataacttaaaatcgaataccttgtttataggtcaagagcttgatattccgcaaagctagtcaattttcgtgttaggaacactatgagtatagaaatactacccgcgcgattggctaaccaaattgctgcgggtgaagtggttgaacgccctgcatcggttgtaaaagagctggtcgaaaacagtttagatgctggcgcaacgcgcattcaaatagatattgaacggggtggtcataagctcattcgcattcgcgataatggctctggtattaataaagatgaactaaccctcgcgctttcacgccatgccacgagtaaactaaaatcactcgatgatcttgagaacatttgctcgctgggttttcgtggtgaagcactggcgtctataagctctgtatcacggttaacattaagttcaaagccaaaacaccaagaggccgcatggcaagcctttgctgaaggtcgtgacatggctgtgcaagtaaaaccaaccgcacatcctgatggtactactatcgaggttaaagacttgttctttaacacgccagcacgccgtaaatttcttcgcaccgagaaaaccgagttttcacatattgatgaacttataaagcgcattgcgctgagtcgttttgatgtgtctattacgcttactcataacggtaaagtggtgcgtcaataccgtgctaaaccaaaccctgagcaagcaataacgcgtgtcgctcaagttgctggcaaagcgtttagtgagcaggggctgcatattcaatcaggtgaagctggtttgatgctgcgtggttgggtattaccggtgggctcagcgaatagcacgcaatatacctatgttaataatcgcatgatgcgcgataaactcattttgcatgcgatccgccaagcgtttgaagaagtcgcaggttcagaagagctaccaggctttgtaatttatattgatattgaccctcgtcaggtcgatgtaaacgtgcacccggctaagcatgaagtgcgttttcatcaaggccgcttggtgcatgactttattttgcaggcaattaaacaagttgttgtgccgcttcagcaagaggctggttttgtccaggagccgacctttgaccgcactccgtttgccgaggctaattcacaaagctcgcagccacactttaatcaggctatggcaactgagcaatatgattaccctaaatctgaattacagccaacacgctcaccgagttattcaggagccacagggcgctcaggcggaggttttagcaacagccaaggacgcagtaaaacatcgcatcaagatgtgaatgctttttatcaagggatcagtgagcaacatgccgcgcattttgatcaagtacgcccagagccaagcattgctgcccccgttactgagcagacaaagcttgctaaactcattcacgtacgtgaaggtgagtgtgtatttagtgaagataatcaattgtttgctgctcactttaaacatgccttagcactcgactggcaagcccaagtagagcaagcgggtagtcttgacggcaaagccttattattacctgtaagagtcaatgcaagtgctgacgatatgaacgctttaaatgctcagcagtcgtggtttaccttactaggctttgatttaatacttgaaaaacagtttgtgatggtaaaaaaattaccaccctgtctttatttactcgatgtgagtaatgctattgagcggctgatcaacggctgtaaagcatcagctaattcgcttgatgaatggctaaattggctggttcagcaaataccaacacgttattacgcaagccaagccttcgcggagcaagtatcgcggttagaaaataatccacaaactatgcaacgtttacgcgaaaaagcggttaaaatagaactatctcagtttttaaattaagcaaggtatttaggcttgaataacttaccggtcatttttttaatgggaccaaccgctgcggggaaaaccgatttagcaatttcattgtgtgggcatttaaacactgaaataatcagtgttgattcagcattggtctataaagatatggatataggcacagcaaaaccaaacgctgaagagcttgctcgtgcgccacatcatttgattgatattattgaccctgcagaaagttattcagtggcggattttcgccgtgatgcgattgaaaagattgatctatttcataagcaaggtaaagtacctgtcctagtaggcggtacaatgatgtactttaagtcgcttattgatggcctatcgccgctaccagaagcatcaccggaagttcgcggtgagctggaaaaagaagcaaaacaatttggttggcctcatttgcataaagagctgatgaatatcgacccagatgctgcgaataaaatgagtgaaaatgattcacaacgaattaatcgcgcattagaagtgtatcgtattacaggtaaaacaatgactgagctgcaaaaacaaaagcagcctgagctaccttatacttttcatcaatttgccattgcgcctgatgatcgcagtgaattacataagcggattgagaaaaggtttaaaataatgctcgaacaggggtttgaaaatgaagtttcgtccctatatagacgtaaggatttacacccagatctaccttcaatacgttgtgtaggttatagacaaatgtgggattacattgcaggcgaaattgactatgatgaaatggtttttcgcggtattgcagccacacgacagttagccaagcggcagttaacttggttaagaggttggcctgaagtaacttggttaaccacgggtgatgaagaaaacttgcaacgtgtagtaagttcgctaagctagtagtagttagaacttttttagctttgttaaattagttcagctacttaattataataacacctagaacgaaggaaaataacatggcaaaaggccagtcgttacaagacccatttttaaatgcgttacgtcgtgagcgcattccagtatcaatctttttggttaatggcattaagttgcagggtaaaatccagtcatttgaccaatttgttattttacttgaaaacaccgtaaatcaaatggtgtataaacacgctatttcaactgttgttccagcgcgttctgttaacttccaaggtgttcaaggaagtgatgattcagaagagcaagaacctggaaatttttaaacttaggagcgtaatgcttgtttgaccgttatgaagccggcgaacaggcagttttagttcatatcgacttacctaaagagggagatcgtgaagatcttcacgaattagagttgttggtatcttctgctggtgttagtagtttggcgattgtgcaaggcagtcgtcaagcacctcatccgaagcttttcgtcggtaccggaaaagcagaagaaatcgctgaaactgtcaaaatccacaatgcagatgtcattattttcaaccatcaacttagcccgtcacaggaacgcaatttagagcgcgtttgtcagtgccgtgtacttgatcgtacgagtttgatccttgatatttttgcgcagcgagcgcgtactcacgaaggtaaacttcaagtagagttagctcagctaaggcatatttctacccgcttgatcagaggttggacccaccttgaaagacaaaaaggcgggataggtttacgtggtccgggtgaaacccagctcgaaaccgatagacgattattgcgcgcaagaattaaaaatattcgtgcccgtttagataaagtggctgttcaacgtgagcaagggcgtcgtgcgcgaacgcgtaacgaaatccctacagtatcgctagtgggttataccaatgcgggtaaatcaacattatttaaccgtattactgattctgatgtgtatgcagctgatcagttatttgcaacgctagatccaactctacgtaagttggatattggcgatatcggccccgtaattttagccgatacagttggttttatccgtcatctacctcatgatttagtagcggcgtttaaagcaaccttaactgaaacccgcgaagctgatttacagttacatgttatcgacgtcgcagacccacgacgtaaagaaaatattgagcaagtacagtctgttttaaaagagattgaagcagatgaggtgccgcagctactagtttataacaaaatagatgcgctagatgacgttgcgccgcgtatagatagaaacgacgaaggtcagccgattcgagtttggttgtctgcgcgtacaggtgtaggttgcgaactactatcagaggcaattaatgagttacttgccaagaagatgtttgctgatgagctaaaattaccccctcagcatggtcgtattcgagctgcactatttaatttaaacgcggttcatcaagagagttttgatgaacaaggtaactggctgttgtcagtacgattacctatggcagagtggaaccgcttgaaaaaagaaatgggacaagagctcgattcttttattgcagctgactaaaagttaccagcatttgtcttttttagtatgagaaatgctgtagatttgatagatttaacctaattcatttagataacaatggagtatagctatggcctggaatgaaccgggtaacaatggcaatgataaagatccgtggaataataaaggcggaaaagatcaaggcccacctgatttagacgaggtactgcgtaagttcggcaacaagtttggcggtttatttggtggtaacaagccaggtaaaaataacggcggacttggtggcgcaggcatttctttcatcctgattattgccgtcattgtatgggcattaagtggtatttacacagtaaaagaagctgaacgtggtattgttttacagtttggtcaatatgaccgtattgcagaaccaggcttacgttggaaaatgaccttcattgaacgcgtgatcccggttgatatcgaagcagttcgttctttatctgcaaaaggtttcatgctaaccgaagacgaaaacgtggttaatgttgagtttgaagtacaataccgtgttatcgacccgcatttatacaagtttagcgtcaccgatgctgatcatagcttacagcaagcattagatagcgcactgcgttatgtaattggtcatgtgaagatggaccaagtgttaacaacaggccgtgagcttgttcgtcaacaaacatgggatgagctaaacaaaatcatcgagccgtataatttaggtattatcgttagtgatgtgaactttaaagattcacgtccgccgggtgaagtaaaagacgcctttgatgatgcaattgcagcgcaagaagatgaagaacgtttcattcgtgaagctgaagcctatgcccgtgaaattgaaccgcgagcgcgtggtcaggttacacgtatgacgcaagaagcagaagcataccgtgaacgtattacgcttgaagcacaaggtgaagtggcacgatttgaaaagctactacctgaatatcaagcagcaaaagaagtaacacgtcagcgcttatacatcgatgcgatggaagaagtacttggtaacagctctaaagtgttagttgatgtgaaaggcggtaataacatgttgtatttaccacttgataaaatcatggaaaagcaaggtacagcaacacgtgttgcattaccaagctcaagtgatatcaaagatcttcgcaataaaataaacacgtcgcgtaacagcacggttaattcgagtaatgatcgtttcgcaactgaccgttttaatgaggggagataagcaagatgaagaattttagtttagtaatacttgcccttgctgttgtattgtctttctctgctgtatttgttgttcaagaaggcgaaaaggcgatcgtactgttattcagcaaagttgaaaaagacagcaacgataacgcggtggtatatggccctggtttacatttaaaagtgccattctttagccaagtacgtcgtttagatgcacgtattcaaacgcttgatggtgcacctgaccgctttgtaacaagcgagaaaaaagacttaatcgttgattcgtatgtgaaatggcgtattaatgattttagtgctttttatcttcgtgcacgtggtgataagcaatacgctgaaacattacttaagcaaaaagtgaacaatggtcttcgtactaactttggttcgcgtacaatcagagagatagtttctggtgaacgtagtgagctaatggaagaagcattagtacaagcttcagaaagtgcgcaggagctaggtatcgaagtgctagacgtgcgtgttaagcaaattaacttaccacaagaagtgagtagctcaatcttccaacgtatgcgtgctgagcgtactgcagtggcaaaagagcaccgttctgaaggtcaagaaaaagctgaaaccattcgtgctgaagtagaccgtcgagttacagttatgctggcagatgctgaacgtaatgcacgtacggttcgtggtcaaggtgatgctgaagctgctgctatttacgcgaatgcttacagcaaagatgctgagttctttggttttgtgcgcagcttagaagcgtataaaaagaccttcaaagataaacaagacgtaatggtgatttcaccagacagcgacttctttaactatatgaaaggtacaaaagcacagtaattaaacactgtgttgaaaaaaagccctgcagtttgtagggcttttttgtttctgtgttttattaatttattcactcctgccagtttataactccctgttctgacacagcttgtcgcgtttatttagatgataaaaattcaggcgcagaaaaaataagctaaacggggtgatctttcacctcgttttctgataaaatctcgtcctaattttttctaagtgaatttgcaatgggtaaaaacgttgttgtactaggcacccaatggggtgacgaaggtaagggtaaggtagttgacctccttacagacaaagcatctttagtagttcgttatcaaggtggtcataacgcaggccatactttggtaatcaacggtgaaaagacggttttacaccttattccatcgggtgtattacgtgacaatgttaagtgtgtgattggtaatggtgttgttttatcaccagaagcattaatgaaagaaatcggtatgctagaagagcgtggcgtaccagtacgtgagcgcttattaattagcgaagcatgtccgttaattttacctttccacattgcattagatttagcccgtgaaaaagcacgtggcgataagccaatcggtacgacaggtcgtggtatcggtccagcttatgaagacaaagtagcacgtcgtggtttacgtgttggtgatttattcaacccagaacagtttgctagcaagcttaaagaagtattggaataccataacttcacgttagagcattactacaaagttgaacctgttgacttccaaaagacatttgacgatgcaatggctatcgcagatatcttaaaagcaatggttgttgatgttactgagctacttgatcaaacgcgtttagcgggtgacaacatcttatttgaaggtgcacaaggtacattacttgatatcgaccacggtacttacccgtacgtaacatcgtcaaacacaactgcgggtggtgtagcgacaggtgctggttttggtccattacaccttgattatgtgctaggtattatcaaagcttacacaacacgtgtaggttctggtccgttccctacagagctttacgacggtcttgataaacaagatccagtaggtaagcacttaggtgaaaaaggtcatgagttcggtgcaacgactggtcgtttacgccgtactggttggttggatgcagtggcaatgcgccgtgcagttcaaatcaacagcatctcaggtttctgtttaactaaactagacgtattagatggtttagaaacattaaaaatctgtactggttaccagttagaagatggcactgtaacgaacgttacgccattagctgctgaaggttacgagaaagtaacaccagtatacgaagagatgccgggctggtcagaaaacacagtaggtgctacgtcagttgatcaattaccgcaagcggcacttgattacatcaagcgtattgaagaaatcactggtgttccagttgatatcatctctacaggcccagatcgtgtagaaactatggtattacgcagcccatttgcataatcgtcatagtgactgaaaaagctgcttcggcagctttttttgtgcccaaaattcactctggaatgataattgtatattatttgctaagaccgactttatttaagtgattttgatgcgtgttttattgcctttaacattactcttctcaagcctaagcatggctgaagagcctattacagctgtgcctctttacacagagagcgagttaatcgctctaataaataaaaacacccatttggcacgtgtaaaggcagatgattgccagttagtgcaagatatcgaagcgcgagccaataaaatggcgttgccatcgtatcagctcttgtatggtgacatgctagcgtatgccgtatgtgtcgaccgaaatgtagaacttggtgtctattatatgcgtaaggctgctgagcagggtctagcggccgcacttgagcaattagggcgctactatgatgtcggtcaattagtacagcaagataaagcaatggctgtaacttatctgcgagaggcatctgcacaggggaatttaaaagcccagatgcggttggttaatttgtttaaccaaggttatggtagtccgcgagattatgaagatgcttaccgttggttgtttcattcaatggttgctgataaagccacccataaaaaaattgaaggcttacttgctaagcttgccgaaagaatgcctgacagcgtcgtcgcccgtgctcgcttgccgatgtagtcggtataattgtgtataaaaaaggccagttttaaactggccttttgttattaatcttcttttatctctttatttttgccgttattagggtcttttaaaaccgacatctttggaggctgaagcgcaacaatacgttcacctacttgaggagctttttccatgttggttgtgaacgggcgaatcttcacaggagagtcatcgtcatctgatttttcaccatgcaaaataaacagtggaattgcttcgctgtttacttctttgtattgttcccaactaaattcttctgaaatccgtgtggcactgactttgccaccttttgcaattaggctactcaagcgagcatacgcaccattatcgccaaacaaaatttgtcgagacaaaaaggttgcactgtctttgtttgctttggcgtggttagttgaagaacgtaatgaaaacacatccttttcgtcgagcaggtgcgagaagtattgcacgcctaatgcgttgtgatggcggttaggcgaaagcgctaatacgctgcgaatcgtcgttaacggtaaataacgctcagcatgctcagattgtggattaccatagtagcaaggtaaaccatccatacgtgccattttacagttctcccatgcagggtcagacaagtgcaccggaatattttgatcttttaagccacaggcaatggcacgagcgacatggtttgcaccaataatcaaaatggtatttggcgcaggttggcgcacttttaacagctttgccagtggcgttgctgttaggctttgtagtaccactgttacgataatcactgtgaatatgagtggtaccattttttctgcatcagcaataccggcttcaaccatacttaatgcgaagacagaacctaccgctgcggctacgataccgcgcggtgcaatccatgacagcactaaacgagacttaataggtaagtcggttctaaacgtagatatcgcgatacacgctgggcgagccacaaatagcacaatagctaagaaaataaacacatcgctgtgtaacatcatcaaatcagataattgaaggcgggctgcaagtaaaatgaatagcgatgaaattaaaatcatcgataaatcttctttaaactcaagcactgaatcaatttcgagttcatcttggttggcaagccaaataccaaatactgttactgctagtaagcccgattcatggcttaagtgattagagacagtaaagctaataagtactaaggctagaataccaaacttgtgtaattcaaatggcagccactcacggcgaataagaagcgtagtaagccatccggcaactacaccaattgtcaaaccaacgcctaaggttttaaatagcgcgataatggtatggctaaatacttcaccctgaccaaccaacataacggcttcaaacaccaataccgcaaataaagccccaattgggtcaatcacgatgccttcccagcggaggatacggtcgatatcttgggtgggcctcatagagtttaaaagtggcgctatgacagtagggcctgtaacaactaacaccgctcctaaaacagcagcaacacgccaattaagctctaaaatccagtaggcactgagacttatgaccaggcaggtcgtgatcatcccgattgaacagaggtttcgaaccactttaccaatgcctttaagttctcgaaagtgcaatgttaatgagccttcaaacaggatcaccgccacacttaaagagacgacaggaaataacaagtcgccaagaagtgcatcaggctctagcacaccactaaagggtccgagtaacaaacctgttagtagtaaaaacaaaatagccggtacacgaaacgcccacgctacccattgtgccaatactgaacacaaggcgatccctgctataaaaattgctgacatagaatgaattatcctttagttactacaacttaaaaataccaacaccttagataatcgcgtttcaagacgataattagtcgctgactttccaaatataatgcttgcttattaaagcctactcaccgtcatggatacaagcaatcttgttgcttcaaatacgattttagtcgttattactactttttgggggtgttttgaaaataaaacttagtctggttcattaaaaattattacatatcaacaaaagacctctaacatactgttattaaatgtgtattttctgtggttatggtaagtataaggcttatgactacttttcgcacttgatctctgcccctaatttcccgtattatagttcgtgttcaaacaatttgatatctaaatagttattagcaataagcacattgtttttagctttgatttcaaaaaatcagttgtttgcgacatttttagtgttttatacactttgttttcaaattaaatagaaatgaacttgtctagattcagcgtgcatttattacgtgttgaatataattatggttcattatctggtcaatgtttagctcccatcgtggcagctgaatctcggtcatacaatctacaccctatctgctggtgtaccagattgtataggctctatgtatgttgttattaataaaagccgcacacagctttttacagcgatacataaacaacacttatcttttttatcaacttatggtttataaccgtttggtctactgactgaataaaagttgtgctatatctaatcgcagtcgttgcgtggcatagtcgtgtgtatagataagtggtttgacaaagtgataatagtcagtgcgtttagtgatactaatcgcgagtctttttatcagtggcatagtggcactgaacagatagtaaaatggaaagttgaacagttatgcaaaagtttaaatggcgacgtatagtattaaaagttggtagcgcattgatcgcaccggagcaggacgggtgtcgttctcgctacttactaaccattgcacagttcatcgttcgctgtcgtgcgcaaggtatcgaagtaattttagtgtcatcgggttcggttgctgcaggttcacacttgtttccaaagcaagaaaagcgctcagtgacaatgaaaaaagcgatggcagcagccggtcaaaccgaaatgatggcaatgtgggatcgcttctttgatttcccatctgcgcaaattttattaacacacggtgacttacgtgaccgtgagcgttataccagtatacgtgaaacagtatttactttactggagcacggtgtattacctattatcaatgaaaatgacacggtaacaaccgatgatcttaaagtgggtgataacgacaatttatcagccatggttgctgctgcggccgatgcagatgcgttaatgattttttcagatgtagacggtctttataataaaaatcctaatttacatgaagatgcggtactacttccggaaatcgaaagcattgatgaatcgatttatgcaatggcaggctgtgctacaagcgcagtaggtacaggtggtatgaaaacgaaaattgaagcggcagaaaaagcgacttcacacggtattactacctttatcttgaatggtttcaaagaagaaacatttaatcgattattagagggtgacaacccaggtacaatcttcacaccttatgaaaagccaatgcaagaagctgtgcactggatgacacacactgcaaatgagcagggtgaggttgttgttgaaggctcaattgatgagtcaaccgaagatggttgtattcgcagcgatgagatcgttgcagtacatggagaatttggcgtaggcgatactattttagtccgcagcgatgatggtacgcgtctagcaaaagcgacagcgaattacagtagctgtttattgaattttattgctgacaacgagcaaagtgaatttagcgaaaagatgcaagattcaatcggcccagttgtttcagaaaaagatatcgcattattggagaagtcatgagtttaattacggatatttcgagtcaagcagctaaagcggctacgcagttagccctgcttgatactgctactaagaatcaagttttaactgagatggcagaggcgctacgtgaaagcaaagcctttatcatcaaagaaaacgaaagtgatttagcggcagcgcgtgataataaccttgctgcagctatgattgaccgtttaacgcttaatgatgagcgcattgaggcaatggctgaaggtattgaagtaattgtaagccttgatgatccagttggtcagttgcgtgaaatttcagagcgtcctaatggtattaagatcagtaagatgcgtgtaccacttggtgttgtgtgtatgatctatgaagcacgcccaaatgtgacggctgatgcgggtgcattatgctttaaatcaggtaatggtgttattttacgtggtggtaaagaagcacttcgtagctcgcaagctattgcaagtgtgatgcacaaagtacttgaaaagcacggtttaccagcagcgttaatttcggtgatcccagatccagaccgtggcttattgatggaactgatgcaacagcgcgacactattgacttaatcattccgcgtggtggtgaaggtttaattaattttgtaacggaaaacagcaccattccagtaattcagcactttaaaggtgtatgtcacctttatgtagataaagatgctgacctgaatgtagcaatcaatttactattgaatggtaaaactcagcgtactggtgtgtgtaatgctctagaaggcttagtggtacaccaagatatcgccgatgagtttttaaatctgtgtgctgttgttcttcgtcaagaaggcgttaaagtaaatgcagatgcgaaagctgccgagtactttgataatgcaacagtacttgctgacgacgagtttggtgaagagtacttagatctagaaatcgcaatcaaggtggtacctgactttgccggtgctattgatcatattgctaagtttggttcaaaccataccgaagtgatttgtactaaagacaaagccgctgcagagctattccaacgtagtgtagatgcatctgtggtaatggttaatgcgtcatcgcgtttttctgatggttcacagttaggtttaggtgctgagattggcattgcgacaactaagctacatgcttatggtccaatgggtcttgagtcacttacaactgaaaaatatttagtgaatggcgaaggtcaaattcgtgagtaatcactaaaaagtaatagtttaaaaagccgggctttgctcggtttttttgtgtctaaaataaaacgaatcgaaatataaagatgagttttttagatatttaaatttggcagattgcctaaaagaggtaggaaagtggtggagctaagcaggatcgaactgctgacctcctgcgtgcaaggcaggcgctctcccagctgagctatagccccacattcctaaaatacaggatgcttaagtcttgcgtctcaagcggggtgaactttaattatttttatctttttggtcaagtattttttttaaattgatcgaatttttactctgaagttttatttttgctagactagagcccattcactgtacaaggcttatccaataatgaaaaaaatagcatggcttttacttgcattacttgctggttgcgcaagccaagaggaggccccgccttttgaaattaataataaacagttttacgaaaaaaatgacgaccaaggcaataaaatttttgcctatgtagtgtcagttaaggcgcaaggaagacgtccaatcaaccttgataagccaatgacacgtagtcagtttaaagactttgctgagcaagaagtatttgaagagtcgagcaacttaaaactcatgctcgaagatcaagcggtcgaattattaaatgaagaacttaaagcacgacaatactgcgacgataaacacattattgacgaagtattgtggcgtgatttaagtgtgcaattacgaggacgttgtttgtaaatgtatgcagataagagcaagttggcagctacgctagctcagttagatatcaattatgaggtgattgagcatccaccattgcacggcagcttagatgccgacaaatttatgctcgatagaccgggcacacgattaaaaaacctgtttttacgagataacgaaggcaagcgccactttttagtgatcaccgctcacgataagcagcttgacttaaaagctattgctcagcagcaagggctatcgcgcttaggatttgcatctgatgagcgattagcgcgttatcttaaagtgccaccgggctgtgtttctatgctggcactattaaacgataagcaaaataatgtcaccctttggctagaccaagaaatttggtttaacgagctatttcattgtcatccttttgaaaatacggctacatggctgatgaaaaaagacgacttagagctattttttgaaagtaccggccatcaaccgcgtattgtatttctacctgccaaataaactaagcttaaacctattaagcaaactaaaagtagcacggtcataaaagcaatttggccgtgttgctgatacaccagccccggcaataatgagcccagtgcgccgccactgtaataaaacgaaacataccctccattggttacacttgcaggagcgttgctgattttattaaccagtggggctgcacttgagtggatcacaaacattgcgccgcaaaaaccagtaaaagcaataacaaaaagtaataattgttggctcattaaaagcaccatcgtcaggctataaaagacaaatacccatgttagtaagcgccaaggagttgatgactttcgtaacagccaaggggtagctatagaggcaagtgctcctaataaatagccactgtaaaccagaccaatatctcgagtattagtgatagcaaagctatcttgtaagatgaagggcaaataatttaacagcgcagcaaagcaaaagaacatacaaaaaacggctccgtagagctttagcacaagcggatcttttaattgtttcagatatagcagtggtgactgtgctgcatgaattgtggcagttttgcttgatttaggaataacgacagcaaacagtattaatcctaccgcaatcacataataaaaactttgccagcttaaaaagtcagtgaataaggcagcaagcatacgaccaaagtatccaccgacaatggtgctgccaatataaagagtcatattacgttgtaattggtcagcctgataagttacaccaatataactggtcatggctgtgagtgcagcaggcagggtgatcccttgaataaagcgtaccagcaacagcagctcaaagcttggtgctaaagtaaaagcaacgcagcttatagccaacacaaacatggcaatctttaaaattgttagcgggtttcgcttagctaaaaataagccatacaccaaaggagcaatggctagtggcagcatagtcgcggtcattaagctaccagcagtggctggcgagacagaaaaatgactagcaaataatccaagtaacggttgtggggcgtataaaacaaagaaaataaatacagagcaaagtaacaaatgtcgcagctgcatttttagctcccaagaggaaaagctttagcttataaggtacagctttttttacaagttcaaagacgactaaaatgataaatcttgcgttaaatcaatatgtcatgatttcatcgcatgttaatctcacagcaatatactcgattgcagtgaatcatctaagctgaacactgttatttgttcgtattgctgattaaaataaccctaattaggcatttttatatggaatttagtcatgggttcattacaagatcaattacttaaagcagggttaacaacgtcacatcaagctaaggtggctaaaactgaaaagcgtaagcagcaaaagaagaagaaaaaaggtgctacgagcaacccaagtgatttacaaaagcatattgaacaaacaaagcttgagcagcagaaaaaagccgacgagcttaataaagcacgtttagaagagcaaaaacagcgtgagcaagtggctcgcgtaaagcagattttagagcaccacaatcaagatgaaattcgtggtgatcgcacctttaacttcacttatcaaaataaagtgaaggagctagaggtaaatgaaaaaacacaaaaagcccttgcaggaggccgtttggcaatttgtgttttagaaggccaattttttgtactggaagacgaaccagcacgaaaagtcgctgaagttagcgaagactatatagtgttccatgttgagcctgaagataagcagaaagatgaagatgatccgtatgctgattttgaagtacctgatgatttgatctggtagttatcttataccggccaccattacaattttcgggtgcaatattgttaaatcatggtctacactaaagaaaatgtttaataacccgtcaaaaaagagaagactaatatgagcaagattacaaaagttttatgtggggctggcattgcaatggctgcaagcctatcttttaacacaatggcagcagatggtgcagcactttacacagctaagctatgtcaaacatgtcatggtgcagaaggtaaagcacctatcatgcctcagtaccctaaattaaacggccaaaataaagagtacttactagcacaaatgaaagacatcaagtcaggtgcacgtagtaacggtatggctgcggcaatgaaagcaatggttgcaaacgtatctgaagaagaaatggctgcaattgctgattatttatcgcaagtaaaataaacgccactttagcaagaaaaggccacatctgtagatgtggcctttttgtatcagctattgatcatcgattaatagtgttttagacttctatacatctatttgtgcttgtcacatatacaaggtttcccatgtttgacttaccaaaactcgatttaaaaaataaagtatctgaacaagaatggcagctacgcgtagatttagcggcatgttaccgtttggttgagcatttccgttggggggatttaatttacacccacctatcggcgcgcctaccaggcacggatcactatttggtaaatgcatttggtttaagttttgatgaagtgactgcatcaaaccttgtgaaggtggatttagcaggcaatattcttgatgacacgccgtttaaaattaacccggcgggctttacgattcacagtgccattcacgaagtacgtgatgacgcacactgtgttattcatttacacacaaaagaaaccatcgccgttgcaacgcaagaaaaaggcctgttgccacttagccaatactcaatgttctcattgccatcattgtcttatcatggctacgaaggcttagcggtaaacagtgatgagaaaaagcgtctacaagatgacttaggcaccaccaaccacatgttattggttaaccacggtggtttaaccgttggcccaacagtgggtgatgcgtttatgcgtttttatgatttacagcgtgcctgtgaaattcaattagctatccaagccagtggtcaaacagcaatcccagtaccacaacctattatcgataatatttataatcaagcgaatgtcgtgcatagcggcagcaccggtggccagttagcttggccggcaatgttgcgtaaagcttatcgtcttgatcctagttttgctcagtaaggagtaaccatgaaagttaatcgcgtcgaagtgttcgatattcattgtccagacagacctgcttggacacctgtttttgtgcgtattcacactgatgaaggtattagcggtgtgggagaggcaggccttgcttatgatttaggtcacagtgctgcagcggcaatgatcaaagaaatggctgatgcatttttaattggtcatgacccatttcaaacagaaaaattatggtcacgaatgctacgcgaaagcttttggggtttaggcggtggtcctgttgtgtatgccgcaatgagcgctattgataccgcactttgggatattaaaggtaaagcattaggcttgcctgtttaccagctattaggcggtaaagttaacgacaagctacgtacatacgcatcacaactacagtttgactgggacagtgaatttaaagcgcttgttcacccacaggaatacgcagaagctgcattaaaggcgatggctgaagggtatgatgcggtaaaagttgacccaatccagtacgataaaaacggtaacacttattacgatcgtactaacatcatttctcgcgctgaaatgaaattgtatcgtgcacgtatgcaagccattcgtgaagcggtaggtgacgaagttgatattatttttgaatgtcacagtttgccaggtgcgacatcagcaattcaaattggtgaaattgctgaagagttcgattgtatgtattacgaagagccagtgaactacttaaatcactcattacatgcaaaagttgccgacaaagtagcggtgccaattgctggtggtgagcgtttgtataaccgctggggtgtgcgtccatacttagaagatcaaagtattgatgtgctacagccagacttaggcttgtgtggtggtttcactgaaactaaaaaagtgtgtgattatgccgatatttttgatgtgcgtattcaagcccacgtgtgcggcggcccagtagcaaccgcagcttcgttacacttagaaaccgcaattcctaacttcttaattcacgagcatcacacttatgcaattaaaaagtggaaccgtgaattgtgtattcaagatccacaacctaaaaatggtttcttccaagtatcagaagagccaggtattggtattgagttaaatgacgaagtggttatgcgctcacaacgtgttgagattaaataacactagttcacattatcagagttgaaatttatctttaaacaataaaaaagcccgttagggctttttttgtaagaaagtgtaattgttaacatttatttattaagcttttttattaaataataggtgtgtagctcaatgttgataccttattttctctctttaaaatgttaaatattttggtctattttgttgttttaatatttttcatgtgttcattgtttatgcttctaaaattatacatgtaaaatccattgattacatatagttacatttaacccgtaattctaataaatatggattttttgtaatatatttatattttttaatttacatttttgtttcactttactaatgtaattgtgccttttaaaaggcgtgaataattataatttaaacagggatacaaaaatgaaatcaatgtttcggaaaagcataaccgcgatagcagttactgcatcgctaggtctagcccttcccgcatcagcatcagacgttattggttctgttcagaatgtggcaaatacctcttcatacactgtaaaagtaaaaaacccagcaacaggtttagagcgtactttaaatatttcagaaaatggaacgttccgctttgcatcactaccttcaggtaactatgacattcagattctaaaagacggtaatgttgttgctgaagacaaggttcgtgtttctttaggtgctaactcaaaggcaaactttgatttagcaagtgtttcaaattcgggtcctgaagttattcaagttgtcggtgcgcgtatttcatctatcgacttatctacagctgactcaggtttagttattactgatgctgaaattgaccgtatgcctatcagccgggatcttacgtcagttgcgttacttgctcctggtgcggttaaaggtgatagtgcatttggtaacacagcgtcatttggtggttcatctgttgctgaaaatgcgtgttatatcaatggtcttgaagtaacgaatacgcgccaaggtttgggttgtggtgaagttccatttgagttttacgaccaattccaagtaaaaacgggtggttactcagcgaagtttggccgagcgactggtggtacgattaacaccacaactaaaagtggtaccaatgagtgggaattctctgcagttgtgcaatatgctcctgactcgcttcaagaagaaggctcaatttcacgtggtaatcaaggtgcggggcaaattttccgagatgaaagcttagcctctgataatagcgctgatatcaccttggcagttgggggtccattaatagaagatactttattcttctacggcttagtgaaccctcgtgatacagagtctacatacacttggggtggtgacgaattctcaccaaacgatcaataccgtaaagagtcagcatcaggtggtgataaccttttctggggtggtaagcttgattgggatattacagataaccatcgattgagttattttgcttactcaaaccgtcgtgatattgagcgctctgtttatgagtatgataatggtgcaattggcgatcgtattgatggagcacttctaaagcgtggtggtaaagcacaaagcttaagctataccggtatcttaacagaagacttagtagttactgcaatggcaggtaacatcaaaactgaatatgaaactcagtctgaaaatctggtttgtccaagtgtaactgactcacgtggtacttcaaacccaatcaccggctgtggtgctgggggtagttttggtgcaaataacgatgacaatacacaatatcgcttagatgttgagtatgtgtgggatgcacacgaaattagctttggtatcgattatcaagagcgtaaatcagagcgaatcagccaaccaattggtggtcatagctatgactatcgtacacttgctgcaaatggtagctggcaagcagataatggagcgcttaccaataacacaggtgctgcacttgattatgttgaagatcgtatctttgacggtggtggtagctttgaatcagaattaacagcttactatcttgaagataactggcaggtaactgatgactttgctgtgaaagttggtttacgtatcgatgagttcgatagttggggtactacaggtaagttattaacgagcttcaaaactgatattgcaccgcgcttaggttttacctgggatccaacaggtacaggtgatacgaaagtttatggtacttacggccgttactacctaccagttgcaaataacacgattttccgcgcagcatcaggtgtaagtgatattacaactgcatacacatatactggggttgatccaacaacaggtgcaccaacaggacttgctcctttggctgacgctatcggaagtggtggtttaactaattcacaacaagtaagtggtgtaccagttatccctgaaaaagatattttccaagcaaaagaagccgatccgttctctaaagatgagtacatccttggtgtacaacaagcgcttaacgatgaatatacagtgggtctgaaaggtacctatcgtgaagttgcaactgcacttgatgattactgtggccgttatgcatacccatattgcgtcatgattaatccaggttcaacatcaagctggtacagcgatggttactactggaatggtactgattggggtgactcaagctttgataatgatggtgttcctgacgaaggttcactgacaacttactcagctgaaacaatcggcttaccgaaagcaaataatgagtatacatcagttgaattcagcttagattaccgcgcagaaactatccgttaccaatttggttatacttgggcacgtagtgtaggtaacttcgaaggtgctgttaaatcagacatcggtcaagctgatgcaggtattacgcaagacttcgacttcccagcagtaatggatggttcacaaggttatcaacctaacgatcgtcgtcatacctttaagttcttcggtagttgggagccagttgaaaacttaactgttggttggaatgcaacacttcaaagtggtcgtccacaaagcctatttggtcaaggttacccatcaaaagatccaaacctaaatggtggctggggtgatactttctacatctatacgaatgagtgcccagacacgaatggtgatggtgaatgtcaacaagacgaaaaaatctatgaaaaacatagccgtggtacagcaggccgtactccatggacatttaacttagatttatcagctgcatataacttcacagtatctgatattgatatgcgtgcgactattaatgtattcaacgttcttaatagccaagaaattacatcagctaatgagcactatgaacaaaatgagggtgaagttaactcttattatggttcagcgtatacgtggcaagcacctcgctatgtgcgcttaggttttgaagctcgcttctaatataagaacaatcaatttgattgtcccctgactaaaaaagcccgtaagggctttttttatatctacttttactgctgtcatcgccttgcaactgtgatacaacagccgatttatcaggctactctgttgattcacatgcctgtcctttgtaaatcacataatgctcaccaccaaagcgaacttttcctcgcttacgttcaataagtgtatctgctgacatattattaaatgattcaataaattgcttacgagcacggtggatttgaatattgacatggcattcattaatacctaaatcgcgggctagtttttttacttgcacccagccttgcacctcgggtgcaaatttatttttaatatctgctagtttatagcgcgctaataacacggtgaggtaatgatgcgagcgtacatcaaagtcttgtagtccatcattgtgcttcacttttaactcagtttgttcttcgtctaagcttaagctgaagataaattctaaatcattggtggagatagggcttaggtcaatcgtgttttcttgtgaggtcatttcagctttaaacaactgccactgttgaccgtcgatagctaaggtttgaccttcttcaaggggagagacctggtgatcatcggtactttcgtagcaccacatgtaattgtgaggatcaaagtagacgattattacggggtcgtggttgttaggcagaaagtgatatcgttccagtacaatagcatcaagcgaatcattagcaacgggtaataaaagatccttcggtggctcaattgaggttaattgataagttaccttattaagttcagaaaagctgattttatcatttaaagctaattgagatttgctgtgtttttcaagctttctaccattaagccacacgccatttttactcaaatcacgaatgtaccaatgtggctcaacccactcaatcacagcatgtatccgagtgatttctggataatttaatagtgtatctacagaatgagctaaacggccaaagcgatggaagtcgcgtaaataaatgcttttaccagagtctttacaggtaagtactgccataaatacatccttatatatggagaaattattttatattagcattttattatcatttattttgcctttaattaacattgggagctaaactaataaatatgcacttaactgaccgagttgtttgtgtttttattaaaggattactataaacaggtacaagtactggcgcaaggagggatgagcacaatataccttgcgacagacgtgcaactgaacaggcaagttgtacttaaagtcatgaagctaaagagtgacaatgttcaacgtgccataaacgaagcacagctcattgctagctttaatcatccaaatatcgtgcagctctatagaatccttcatgaggatgagcaggttttattagaaatggaatacgttaaagggaccacacttgcacatctaataaaagagcggcagctcagtataactgagaaaatagatatactttcgcatatttgtgatggcttagcaggtattcatgaaaaagagattctacatctcgatttaaagcccgccaatgtattgatcagtgaaaatggtgcagtgaaaattgcagactttggtatttcaaaaataaagcacaaagacataaacacacagactacaagttttggtagtttgaaagcaatgtcaccagaacaacttaataacgagacattagattttcgcagcgacctattttcattggggttaatggcatatcagctatttagtgatgttcatgcttatataaatcaagctaaaagtacagcagatcaagatattgctgcagcaataaagtcatccccttgccgtgcaaattatgaatctatttatactatatcacccgatttggcagtactaattaaaaagttattggcctttaaaccagaaaatagaccaacaagtgcgggcttggtagctgcacagtttgaaagtattttagcaacgctcagttttgattgccctactgttgaagtgaaagatatcgaaaagcagcaaagcgtccccctagttgataaaaggcttatgtacttaatcggctttacagtgtgttttggtttgctgatttggacttatttggcgatgcaaacgaaggagtatattgcgcttttaccaattgattttacatcgacaagcgaggtgacagaaacacaaaagaggttacttaacttgggagtcactgacgcagtaactgagttattgttagagagtcggcattatgctttgatttcagaacaagaaattaaacaaacacgaaacgtattgggtaaagaagctagtttgagcgggttggcaagtgcactcggtgcatcaaagttattagtaccaaaactagactgcaatcctttgtcgtgtgattttagtttgagtcagcttgatcaaaatgccacagtagtgagtaaatatcgtaccgcgacagataaagaaaactatctaaatatatacaattcggcactttcttcggtgcagagcttgcttgatgtaaaggttgctgagcacagtcagttatccttgtctgatgaatttgttgataaatatgtgtcactggtggcactcgttgccaataacttggaaagctctaaagtagagaaatcaatagcagagtcgttgctttttcagcgtgctgattttaaacctctttacccgctttatcgaaaaattatgttgcgactttataagatgacgcaaaatattgcgcttataaaagagctacaaactcagctagataattcacccgaatcttatcgtgaaagcccagcttacttaattgatttgttggaaatatatcaacacgcaggtgagcaaagtaaagcttataaggttattaagcaaattcaaaactcatcattagaggcatatcaaaagcagagtattttagctgtttactataatcgaattggcgatctagaaagcgcattaacgcatgctcgcaatgcatacacacttagaccaactttgctcgcaacaagaaatcttgcgattgcttacctcactcaaggacatcgtgctgaagctgccacttatttaaaagaggttttacgctacaacccttcggatattgtgacgctaaaaacattggctgatatttcattgttatctggagaattaaaagaggcgcaacaacattatcaaaaattaattgattcagggcagcagagcccttctatacttagtaattactctatcgttctctccttgcaaggcgagttagatgaggcattaatatttgcgaatcgagctatgctattagcgtcagaaacatctaccttgcagctaaattacgctgacttactttatttaaagggccagactgctgaggcactctccttatatgcaagaattaataagcgccttgatgcttcgccaaagaatattgctgaacaattagaaaaagcgcaggtattgattcatctagagcaaaatcaatatgctatgaatcaaattgagcaggtattaattgcgcaacctgatctggcagaagcatattttgttaaagcaatacttcaaagtgtactaaatgaaaaatactcagcgctagcgtcaatagatcaaagcattaagctgggctggagcccagttttttatcgcttaggttggtttaaaccgttatgttccgagcgtaaactcgccactttaattggtcagtctcattatttatttttatgtaatcataataaaagcgcagagatagactctgcgcatttataaattaggttggctccatgtcctcaatgatgacacgaggatcttgagagaagtaacgcataagcgagttaatgtctccatctcttttggcaattagtcgaaaattgatctcataatttgctttttgatctaattgtcctgcaatagccttatttggactgttagctaataattttgctagctcttttgataatgcttgatgaggtaaaatgttcgaaatagtgacaaccaatgctttgccattatttgcgacaatactgttgagttgatagttgaaattgtctttagcatcagtgaagtaactgccattttcggcgaaactccaatcggattctttagcaagttcgtaatagaggttcaggctgtcacctgcaagtagatctttgtagttaattttaatttcttcggcactcgcgccagactgagaagtgatttcccatgggccgttgtcattgggaataacaaaaaagctaagatcgttcatgatataaaatcctgttttctaattgaggagctgcttatttaattcataagcagctataactataggttgtttaacaagaaccccaaattgtgccgctccatagcggactattatttgcgtataccgttgctttaattccattaaatggaggaacaccaaagcgaaatccacacgtttgcatacatactttaaccgatgtaccgcttggaattggtaaacttactgaaaaacagatattgccgactactggaaaattaacgcaaattttgccattttcataactggcgccaacgcacgctgaaatctgtgcggctaacgtggatggatgaaactcaagaggttgattagctgccgtctcgctggtcgctaaactaatagaatgatctttggttagatcgggtactaagttggtatttttatcgctgtcacacatagtcaaattctccttgcataattttgaagtggcaacaaacaaatctctaaataggtaatttgctgtttgcctgtttgtgcaaggaaaaggataggtagttctattacagcttgttattacagattattacatgatggtattttgttttaatatcaattgattggtttgcattttaccaaaggcagtggctcggttgctttactatctaaatggcgaacaaagcacatttggtttttaattaacagctcaaagcgttctggtatatttggatgtgaaccgctgagtggattcccttgtatatcaacgccattcaagctttcgatgacaagtatgctgctattgataaatgcctcgtcggatacctgaataggcttactgtgcattaaccttgaaatgccttgtgctattaaggtgctttgtggctcagtaacgcgtgcgtgttgaagtttaggggttggttgttgggtatgtgaactacagccaaacaaaacactaagtagcaagatacaggttagatgggctctcatcatagctccattaagtttacagtgcctaataaaggttattatattgaatatagtcagcttctaatcaattagatagattgcacgggcatttttaaaactgagttgttgccatacattgtactgtttacacaatgaaaaataatgctgccaacattgctcatagcaggtattgatttggcatacagggaagttactggcaaacatgattcgatgttcaccaaaatagtttaacagttgatccagtaaccagcggtgcttattggccgcgagcgttgtaaattctaaaccagaaaacttaatcacgatattatcgcagcgacttaattttataatcgcacgtagccagttttgctcattattaataaagcctaaatgatttataaccacctgtaatttaggaatagcacgacagtaatgcagtaactgttcggttacctgttgattttcaatctcgaactgagcttcaaatattaagtgtttactagcaagataagcaaggttctcttggcaatgcgggtctaataaacgcattgagtcactaccttcggttatatcacgaatgccagcaagttgaggttgctctaaggctgacattgcagcgataaactgattgctaggagcattaatggcgctaaagctaattgctttatagggcatacttttcaagtgtttgctaagccagttaagctcattgaccggcgcttgattgtcgaagcctgcttcaatatgcaccagtgcttctagttgaaatggacacgctgctttaagctctgcagcggttgtttgcgctttaattttatcgaggtttggccaagcaggaggagtgttgccttgaagccaagtatattgaccctcagtgaggttaaaaaagtgcacatgggggtcaataatcttgtcgctcattgtgtggtgtatccaccatcaatgctttgcaagctaccagtgataaagctcgcttcaggactgattaaaaagttcaccaaagcggcaatttcttctggttgccctaagcgacctaaaggttgcagcgcagcttcttcagcaacaacctcagctttgttggcaccactttgctgacaatatgcatcaatcgcattatggaaaagcggcgtttctatcgtgcccggacaaaccgcgttagcacgaatgttaaacgcggcataatccagtgctgtggtttttgccattgaagccagtgcatgcttggttaggttataagcaaacgaatttggtttgccaataattgcctggtcagaagcaaccaatacaatgctgccaccttgctggcttttcatgctaggtaatacggcttgaattgcagcataagcaccttttacattgagcgcaaacagggcatcaaacgttgcttcatcagtgttttcaatgttggcactcaaatgacgacctgcattggatactaaggcatcaacgcgacccgtctcggcaatgatatcggcgataaccgacttcacctgctgaatatcactaacgtcacagtggcgataattgccctcagatggggtgatatctaaattataaacggtgtaagcttcacgctctaaacgctcaacaatcgctttgccaatacctttactgccgcctgtgacaattgcaacgtttgtcatcatttacccttagtggctgtggccacagccgccttcaccgtgcacatgaccgtgtgataactcttcggctgttgcttggcgaacattaagcacttcaacgtcaaaagtcagtgttttaccagcaaatgggtggtttaagtcacaatctgcattgaaacgacctactttaacaatcgttacttgatgacgaccttggtttgaatgaacaatagcagtcatacctggcttccacacttttgtgttgccttgtaagtgcttaagtggaatacgttggatcagatcgtcaacgcgttcgccgtaagattcgctaggctctagagttacgctgaagttatcgccagcagttcttccttcaagcgctttttcaagacccggaagcatgccttcattgccatggatatatgaaagtggctcgccatctttgctagattcaatttgctcgcccgcttcactcaaagtgtagtgaaactcaaccactgcgtctttactgatttgcatgttatttctctttagaatttaaaatataagcgttgattttacgctaagcgctttggctgagcaatcaaggctttttcaatgagctctcaataccagataacattacttcgctggctgatgcttgcggctcgggctgcattatttgtggcaagtgcaaagtgagtatggtgccgggtttaattatgctggtggtggttagtttattccactttgcaacatctttgtgaggaacatcgtaaagctgactgatactccaaatagagtccccaggttttacttggtaattaactgcaatagttgataccacatcttcttgttgctctaagtaaggactaatatcgtaatcgacgatgagtgattttggcatggtgtgaggctttgttaaactcaactgctcgccaattttaattaagttcgaagacttgttattcatcttttttaaatcagctacttgcatactaaagcgggtggcgatgctgtataacgtatcacctttttgtaccgtgtactctccagcaaaattatttctaaatagcttactttgcaacaaggtttgttgctcgacaggcaggagtaaggtattggggccatttggagagctttggttttttaaataaccagggttcaatttgtgtagctgtttacgccccacccctgacaaactagcgataactgaaaaatcgaactgctggccgatattaaactcagtagtcagtgctttatttgctagccttgggcgcttaaggccgagttcaggatgttttagtaaataactcagtgccattaactttgggatatagtcggcagtttcttgaggcaatgaaagagaccaataatctgtttttttacccaagcgtttgttttttgctatggctttttttactctgccttcgccactattgtaggctgctaaagcatgcagccagttaccatcaaaccgtttatgtaagtaacgtagataggccaaagcagcatcagttgaggctaatacatcttgacgaccgtcataccattgatcgctttgtatgccaaagtgataggcggttgctccaactaattgccacacccctacggcatgttctgatgagcgaattgtaggcctgaagtcactttctacaaaaggtaataatgccaactccattggtaacttttgctgctctacacggcggacaatatgatacagatagggtgcagcacgtttgtttactttcagtaagtaattaggttgtgctaaataccatttaagacgagcggtggtatgtgcattggtttggaaaacaaggcttaaattattcgcaatgtgttgccataactcttcggcacgtgcagttggtaatggagtattatttactggcacaggctcttttggtgacacctttatttggggcgtcgccacgataaactcgttagcttcgagttggggggctaagtcaggttcatagtggctgaatatagctggccgctctgagtgttcctgagcagtgtcttgctgagtaagttggcatccttgtaagccaataataaagctcagcaaaagtatgtatttcaattttatacgagccatataataaaatccttttattattttagcgctattttgacaatttggccttcttaagtccagcttctagaaacatagtgaatgcccgattaccaatttcatcaagctgatattgctgtttgatctgttcaggaaaaagctcaattaactcctcaaccgatttatctggctgcgcttttgtaagggtaataattgcgtttaaaaatgcgattggtttagctagttcagctgtatttagctgttcgccatggccgggtaaaatagtcacgagctcagtgttattgtgaatttttttgagcgttgctagccagttttctaattcgccatgaccagggtagggcaagctatcaacgatatctgcaccaactaacactctgccatgatcagcggtaatggttaagtcaccttgagtgtgtgcccgataaggcgttaatgtaatagggtagtgacctaattcaagactagtctgctttgatacgcttatcgctggtgggtttaaactaagctctcgccaacgaaataaacgttgtttagcaagggttaatttgtcgcgccaaatagtttgctgatcttcaggctgattcgccaagcgttggtagctaagctcaatacttttttcataaccatctagtttatcttttaatgcttgttgcattgctgcaaattcactagccacttgctgatgtacaattagtttggcatcaggaaattcagcttgtaatacggctaaccctaacaagtggtcatcgtgaaaatgactcgccactagataacacaagggggtttttaaacgttgttttaattgcttggcaaggctttcaacttctgcaaagttaccacttgcatctaccatcaaagcacatttttttccttcaatgagcacttggtttgaatcataaaagcgtaacttactttgttgttttaaaaattgaatttcaggcgtgattgtatgccagctaacatttgcttgtgcgtttaacccagtaaataaaaaaagtaatgcagcagcaattcgcatatttatttgctcgaatatgagtgaatatgatcgattgtaaacaaaaaaagcgctgtgtgcgctttttagggatcgagatgttggctgagtttatcaattaaactgtcatgttgctgttcttgttttgcttgttgcgatttcacttcaagcaattcatgacttaaatgtaatgcagccattagcaaagcgttttgttcattacgaactgttgagcgttgtttcatttgctccaccaagtcatttaaattttgagctgcggctataagggcatgctcttgcccttgtgggcaagagaattcatgttccttacccagtagctcgacagtgactcgctgactttgtggggagctcattagctagcctgttgaacgctttgtaatttctcaagcagaccggtaagtgtactgctagcatctttttgtttctcttcgttttcgagaacttcaagttgcagagtttcgttttcatctaacagttttgctgtttgttcttgtaagcttttaacttcgctttcaagttcactgttgcgaaggattaatttgtcgatcagttgttcgagttgggaaagagtttcgttattcataaatgcgctcataaaactgtgattattgtcatgcaaatgtaaaggaaagtgccttgatatgccagcatttacggctgttttagcagatttttatttattattaaggcgtaattcagtgtaatggcttttttattcatttatggttcactgaagcgccacattttctgtttatcatgtacaatatgactattcatttttaatgcagcttttgcatctggcgacttataaatatgcttagttatcgacattctttccatgcgggcaatcctgccgatgttttaaaacaccttgttttagctgaagtacttaaataccaaactatcaaagataagccactcgattatgtggatacgcattctggtgcaggtttttttgaactggctggtagtgatgcacaaaaaacacaagaatatttagatggcatcgccaagctttggcatcaccgtagtgaacatgcggaactaaatgactatattgagcttattaagttgtttaatgaaaatggtaatttagatttttacccaggctcaccaaaaattgcagagcacttcctgcgccgccaagataatggctggttttttgaattacatccgcgcgacttacagcttttgcaagacaatatgaaaggaaagcgttcaattcgcgtgcgtggcgaaaatggttttcaaggcttggtaggcttgttaccaccagcctctcggcgtgcgtgtgtattgattgaccctccatatgaaattaaagatgactatgacactgttgtaaaaacgcttgtcaaagcacataaacgtttcgcaacaggcacatatatgatttggtatccggtagtcgaccgtgaacgaatcgatagaatggaagcaggattaattgcgtcgggtatgcgtaatattcaacttttcgaattagcaactgaggccgataccgacgttcatggcatgacagcatcgggtatgatagtgatcaacccgccatggaaattaaagcaaacaatggatgcggtattaccagaacttgtttcattactgagtgatagcagtggtttttatcgcagtgaacagttagttgaagagtaaattgttttgcaaataaaaagcccaacaatcactgttgggcttttttatgcgttgcctaaatttatctttatagttgtttatataaagtttaggttgctttatttagttcatataagtggctgcaaaggtagcaacaggttcgctactgtcatcaagcaatatgagcttttcaccatttattgtaaattgagcagtcgcagctaaagctgcagacatagctgcttctatatccatttgcgaaatacacattttttcggtgcttgctaatgggttaaaggtcagagtttggccactgacttcatagctaccagagaaattattgcagcccaagaaaccattagttgatccatcttctttgaattgaataaaaggctctttggtttcgaccgtcactgcttcatcattaatggtgatagctttccagtaagtgttaaccaaagtaacatctggctttttagcagatactttagaaacggttactttataaacctcagcagtttcatcttcgacaaatggattgttatgagtagtgctgatataaagcaatttaccttggttttcgatgcgagcacttacgctgtaacggtgacgatcaacgattttactatcatcatattcaagagccacagtgtaaggtggtgcaccatttagttcaatctcttgctcgctgattacatcagcttttgcgtccatttttgaaacatcagcaagttgcacctttagtactgagcctggtggtaacatgctgcggtctaagtaagtaacctcagtagtaagagttttcattgtagattgctctgcttgttgggtactagaattgtccccacaacccgttaatacaacgctgctacctaacagcataagactacaaatagaggcgttttttaaagatgagaaggtatccgaagccatgattattttccttgcgttacactatgtaaataattagaaaagcataaagttcgctgacttaatcatagcttaattaattgaaaatgggcacaaggcccatttatttcatgtattattttttcacgtacttagtgagaataacaatacgctgaccttctacgcgcccttcgatgtgttcagggttgctagtcaggccgatatttctaacagctgtgcctcgttttgcaactaggctactgccttttacgtcaagatcttttatcagtgtaacggtgtcaccagcttgaagaaccacaccattgctatcgatatgtttaatgtcatcttcttcggcaagggccatttgcgcccatttaagggtatcttcttcaaggtaaatcatgtctagcgcgtcttgtgcccaaccattatccgcagctaagcgttttaacatgcgataagccacaacttgcacagcgggtgtttgactccacatgctatcgtttaggcagtgccaatggtttgctgttagctctgcgctattgtcaatttggtctttacaggtttggcacacataaatgcacttgtctgaatgagcctctgtaacaggggggacttcgtaaacagataggttatctgtattagtacaaagttcacattggttattactgcgttcgataagggcttgttcaatgctcataggaggctcttttaagttaacaaggtaagaaaaacagcgcgcagtatagcaaaagtaggtccaaagcggaatatccttagttattgtgggggtatgtttttcgtatatttgttgatgatggcatcaaggcggccggattgttttaactcatcgatagccatatttatctttggtagcaatgcttggtgttcagcacgtaggcgaatttttaggttaccaagcgagtgtagcgcgccaaagtcaatatcagcattaaattgctgagcccaatacagcgcaggcagtttatctagaatgactacctcaatacgttttagttttagagcttcaataagttgcttttcagaactaaaatcgacccgtttaaagtggttgtcgtcgtagtaataatagccaagtatagtaccaacaggttgattttttatggcctcaagctgttgccaattggtcacattacttttcaaacttactaggtactcttcaatggtaaataagctatctgaataaataaattgtgggtttcgcttttcggtttggcttaaccattcaaggctaattacatcaaagtcgatgtgcccaagatgaagatatttaacggtacgtttggctggcagctctacatgttttgcttgtatgtcagcgagctgcataactcgcctgataatttcaggcaatatccccggttcacgtttatcgtttgtgtaatatggaaaatagtttccagatcccgtgacattgtatttaagtacgggtggttgttccgcttgtacagaccgtgaaagaagtaataaaactaagaaagccgagtaaattaggggcaatggattatttgacatcgttttcatgtgcctagtgtggtcgggtttttattttttagcaaggtgttcagctttcactatactaagaacaggagtaaagtggggggacagtatctgagcgagatgtataatgtcagaattaagtatggaaggtaacaaaagtcagagcatgacgcagtatatagcccggcagccaatatttaatgctgacagaagcctgtatgcctatgagttattgtacagggaatcaaatgataatgtctttccggtggggaccagtgatggtcaagctacaggtcgattgtttttcaatgccttgatgttgatgggtttagagaagcttacaggttttcaaccagcatttatcaacttatcaactgacgctattttagatgactttccaaagttgttgcagccaaccagtgctgtgatagaaattgtcgagcgtgcgacaagtatcccgcaaattattggtcgagttaaacaattaaagcaagatggttacctttttgctttagacgactacgacggtgatgataagtggcaagatgtattgccattaatggacttcataaaaatagaggctgctgacccaatcattaaaaccaatatgacggttaaaaagcttaaacgcagctacccaaaagcaaaagttattgttgagagagtagaaagctacgaagattttcaacaattaaaagcggctggttgtgatttatttcaagggtatttttttgcgaagccagaattgctaaggtttggcaatgtggagccttcaaaagtggctgttctagagttactcagctgcactgctcaaacggctttaaattttgaccaaatccagcaacgtgtagccaaagatattgccttaacagctagaatcttaaggctggtaaacgcacgaaccagcagtacacaacagacaattcgctcaatttcgcaggcggttatttatttaggtgaagatgcaattaggcaatttgttcgtgtattagcactaagcgagttagggaacgataaaccgcaagagttaactaagcttggtttaactcgtgctaaatttatatcactgatgcttgaacctgcgggtaaagagctttcggagcaaggttatttagtgggtcttttgtctgtattggacgctattttagatgtaaagcttgatgcggttgttaaagagttctcgcttggagcagaacttacaagtgcactggttaagtttgatggaatgcaaggagccagtttgcagcttgttatagccatggaaaaagaacagtggcaaacagcaactaagttactaaagataattcgtccagcagcgaatatggatattgtgtatcgtgcaatgtatgacgctcgtgcctatgctgacaatgtgtttgacactttagcatcggttgcagactaatctcgttaagttagctatgatgcccgcaatgtttacaggtaagggttatcaatatgcgtgtttttttccccattgtaatgattattgcggcgttagctttacttataccgggcgtgacgaggccagttttaaccttagaaggtaaaatagataaatcgaagcttgctaaaacaggtattgaaatgattgccgatgaaggcgatcgcaatacgcgtagtgtactaatgatggcatcaagcatgttggggcttgataagcttgaaggcgaaatcgatgcctacaaaaaaacgcgcagcatttggggcacagtaaatgagcttgccaataacaaaaactaccttgttgccgcgctggttgcggtgttctcgattgttattcccactttaaaactcctgatgcaattgctttattgttttttaccgatgaatagatttaagcatttactcggtcaactcatacaaggcttaagtaaatggagcatggttgatgtgtttgtgattgcattaatcgtgtcttatttggctggtaacgccgatggacaaatgggcgagctaatcaaaatgcatgccgaattaggcgatggattttggtattttactggttattgcctgtttgctattgctgccagcagtagcattaaaacagataaacccttgtcgagcgcgtaaatttcgggctacaatttgggcaactaatttttaaggtatgatgatgacgcgactttcaagctacttattgatagctatgatgctgctcacttttgtgggtcagtcagttgcgtctgttgctatggtatgtgatatgccacatgccagcatgcaaatggaccatcatgctactatgagcgctgacagcgacatgagtgatatggactgttgccatgaagacgtaatggataccagcgattgtgcgtgtccgttcaatgcctgtacagctcactcactcctgccgctaaatgatttagttgttaaatcaattaagcaatcagaaaaagtcacagtgttaggcgccagccagcttagttttcgtgtaagttctttatatcgtccacctattactgcttaagcaggataggtctgtctaaaattcagcaaaacgctgaaatacacctcaccctgcaaccaaaatctattgttttttaaccatttttaagatttttggagcatgtgatgattcacagcaaattgattaaggcgctttctcttggcgcagtattggtaacctcaagtttagtgaaagcagagccgttggcactcaatcaggtgattgattatgcattgactcacgagccttggttacaggcaaataaataccagcaacaggcgatagaagcgcaaagcattgcggccggtaccttgccagatccagtattaaccgttggactcatgaatttaccaaccgatggttttgcctttgatcaagaaggtatgacgcaattcaaagtgggcttgtcacaacaatttagccgaggtgatagccttgccctacagcagcaagcattaaaacaatcagctgagcaatatccttggctgcgtgcagaccgccaagcgcaggttaaagccattgttagcgaagcatggctaaatgcctatcgcgcgcaaaaaagcattcaactgatcaaccaagataaagccttatttaatcaacttattgatattacagaagcaagctatgccaatacacttggcgcaactcgccagcaggatattattcgcgctcagctagagctgactaggcttgaagataagctggtgatgttagagcaacagtttgatagtgccaaaaagcgactagcacaatggctacctattgaaatgctaaacggtgcagtgagcgatgacaatactaaggtggctgcactaatgccttatcaagagcttgaaccgtctggggtgactgaagtgttgatgagtcacccggcaattattgctattgatcatgcaatgcgtgctaaaaacacccaagtgcaagtggcaaaagaagcgtataagccgcaatttggtatgaatttaggctatggctatcgtgacgacacacctatgggtgactctcgcgctgacttgttctctataggggtgagtgttgatttaccgctgttcactgataaccgtcaagatcaacaagtcaatgccgcaatagctagtgcagaggcagtaaaaaccaacaaacttattaccctacaaaaattgcaaggtcagtattttaaagagcttagccagttgagccgactagcccagcgcaaagcactgtatcaacagcagctattaccgcaaatggctgagcaagccgaagcgactttaaatgcttacaccaacgatgatggtgacttttcagaagtgatgcgcgcacgcatcagcgaacttaacgcaaaaattgatgcgttgaatatcgaaatagacaaacaaatcaccctcgctcgccttaactattacgcagcagcaaaagataaccaaataaatgcagcacaaagccaaggagctaccaatgaataatacagtgaaattagttatcgccttggcggtaggtgcggcattggcaacggctgtaaataaactagctgagccagatcatggagctatgccaagcgctgagaaaaagccgttatattgggtagcgcctatggacagtaattatcgccgtgatgaaccgggtttatcgccaatgggtatggaattagtccccgtttataaggagcaaagtagcgctgaagacagcccaggtactgtgagaatctcaccagcggtcgttaataacttaggggtaagaacggcgcctgtacgttttaaatcattacaaacgacggttgatacggttggctatgtgcaatacgaccaagaccaattagtgcatattcaccctcgtgtcgaaggctggatagaaaccttatatgtgaaagccgcaggtgaccaagttaagcaaggcgagccactttataccttgtattctccacagttagtgaacgcacaagaagagctactgcttgcccttaaacgtaacaacgcagtgcttatacgtgcggccaaagcacgcttagcctcactgaatgtttctgatgattttattgcgcgattagagcaaagccaaaaggtcagacaaaacattaccttttatgccaagcaaagtggcgtattggatgagctaaatatccgcgaaggcttcttcgtaaaacctggcacaaccatgatgagtattgctcacctagaagaagtgtgggttgaggcggaagtttttgagcgccaagcagggcttatccataaaggcttgccagttactatgacattagattacgtaccgggtaaacgatggcagggcgaggtcgattatatttacccaacccttgatgagaaaaaccgtactcttcgcgtgcgcttacgttttgccaaccaagatggcttactaaaaccaaatatgtttgctgaagtgagcattactaccaagccgactgagccgcaattagtcatcgcaaaagaagcggtgatccgcaccggtagccaagaccgtgtcgtcattgatttaggtgaagggcgctttaaatcagtcgccgtgacgctaggtcgtagtgataatcacgatgtcgaaattttatcaggcttattgaaagacgataacgtagtggtgtcagcgcagttcttaatagattccgaatcaagcaaaagctctgactttatgcgtatgcaagagccggatactgatagtgcaatggtcaatggcgtgatcaacagcattgaccgcgaagcccgaactgccgtgatcagtcgcgaagccatccctaaatgggggcgagatgcagcaaccatggagtttcatttttcgccacgcatcgatatgtctagtttgcaaagcgatgatgaagtgcattttacctttaagctggttgatggtgagtttgtgatttttgacattatgaccatgagccaccctatgcaaggagaaatgcaatgatagcagccgtgatccgttggtcagtcggtaatcgcttctttgtattactgctgtctttaatgttggcgggctttgggattttttctttaaagaataccccagttgatgccttgcctgacttatctgatatacaggttattgtaaaaacgtcttacccaggacaagcgccacaagtggtgcaagatcaagtaacgtttccgatcaccacagccatgttgtcggtgccgggtgctgaaacggtcaggggcttttcgttttttggtgactcttacgtatacgttatttttaacgaagacaccgatctttactgggctcggagtcgggtgcaagagtatttgagtcaagtaagtgctcgcttacctgattcagcaaggcctgaacttggccctgatgcaacaggggtgggttggatttacctgtatgcgctggtggataaaaccggtaaacacgatattagccagctacgaagcctgcaagattggtttttaaagtttgagctgcaaactgtgccgggcgtatcagaagtagcgtctgttggtggtatggttaagcagtatcaggtgaatgtcgacccggataaattgcgtgcttatggtattccgctaagtttaattcaaacagcaattaagcaaggtaaccaagagcgtggtgcctcagtggtcgaaatggcagaggccgaatacatggtatcgagcacaggttacatcaaaagtgtcgcagatttagaagccattccgctgggtactaatgccaatggtacgccactgcaattacgcgatgtggccgatataaaacttgggccacaaatgcgccgtggtattgctgaattaaacggcgaaggcgaagtaactggtggtgtggtagtgatgcgctttggagaaaacgccgaagcaaccattaaactcgtaaaagaaaagctagagtcgctcaagaaaggactgccagagggcgttgaaatcattccagtgtacgaccgttcaaaccttattacccaagcacttgataacttaagttcaaagttaattgaagaattaattgtcgtggccttagtgtgtgtggtgtttttattccatatacgctcatcgatcgtagccattatcacgttgccaatgggtattttaacggcttttgtggtgatgtattggcaaggtataaacgccaatatcatgtcgcttggcggcatagcgattgccattggtgcaatgacagacggtgctatcgtgatgatagaaaatatgcacaagcatatggagaaaacccctctgaccgatgagaaccgctggcaagtcgtgatggactcagcctcagaagtcgggcccgcgttattctttagtttattaattatcaccgtcagctttatgccagtgtttattctagaagcacaagaaggccgtatgttctcgccactggcttatacaaaaacctatgccatggcggcctcggctggtttagccattacattggtgccggtgttaatgggctactttattcgcggtaaggttatttcggagcagaaaaaccctgttaaccggttattggtggcagcgtataaacccttattaaatgcggtattaaaagcgccgaaaacaactctgttactcgctgtggttttggctgctattggtttttacccagttaataaaattggtagtgagtttattcctccccttgatgagggcgacttaatgtacatgccaactacttacccgggtatttcaataggtaaggcccgtgaaatcttacagcagaccgataagttaattgccagtgtgccagaggtcgagtcggtattcggtaaggtaggtcgtgcggatactgcaacagatccggcgccactcaccatgatcgaaacctttattcagttaaagccaaagtcacagtggcgcgagggcatgacaaccgagaaactgaaaaaagagctcgataacctggttaagttcccagggcttaccaatgcgtgggttatgccaatcaaaacgcgaatcgacatgcttgccactggtattaaaacgcctgtggggatcaaagttgctggtccaaagctgagtgaaattcaaaaaatcggtgagcaaattgaagtcatcttaaaagacttaccgggcacggcttcggtttactctgagcgtgttgccggcggtcgctacatcaaagtcgatatcaaccgtgaaaaagcagcgcgttatggtttgaatattgctgatgtacaacaggttgttgctactgctatcggtggtatgaatgtgaccgaaaccgttgaagggcaagagcgttaccctgttaacttgcgttacccgcaagattatcgtgactcgccagaagagcttaagttgctaccgatcgtgacgccaaatggacagcgcatcgcattggctgatgttgctcatgtctttattgaagatggcccgccgggtattaaaagtgaaaatgcacgtattaatggctggagcttaatcgacattgaaggcagtgatatcggcagttatgttgagcgtgcgcaacaagcgctgcatgagcaactcgagctaccagctggttactcaattacttgggcggggcaatatgagtatatggagcgtgctaaagctaagcttagctacgtattgccattaaccttggcaattattgtggtgctgttatacctcaattttagaagctttactgaggtagcaatgatcatgttgaccttaccgcttgcaatgattgggggtatttggttgatgtaccttgaaggttttaacttctcggtagccgttggagtcggctttatagccttagctggggtcgcagtagaaattggcgtgatcatgctggtttatctcaaccaagcttatcaagatgctaaagcgcaatcagcacaatttacggttacagagctgcgccaagcaatcatcaatggtgcgggccttcgggtgagacctgtaatgatgacagttgccaccattattatcggtttactgccggtgctttatggcactggaacgggtagtgaagtgatgagccgaatagcagcgcctatggttggcgggatgcttagtgccattgttttaacgctacttgtgttacctgcgctttattttatttggcgtaaacgagatctataaattttacagtcagtgtgtaacttgtacgcttttacttgctacaagttacacattttatttttaaagttatgataattaaggtgttttttactggtgtgatttatgcaatgtcttactaaattgattttgataaggaatgcacatgcaagttaaaacaatacagcaagtttatgattggaccgtgttatttcatacccaaatggcggccaacttccataatgttaaagacttactggacgagcacaatcaaatgctggtggagtattatctgcaatacgagaaaaaattggcagaagatctggttggctttaaagccattacagaactgaacacactggatacttattgctacgagtacttttcagacaacccagatttgatcacgtttgatgatattagtactgatcaaaaaattgatgaaaaggccattcaagtatatttaacgacacagcatcaaaaggttattgatttatatgaataccttgtatcgcgtgccgaaactgctgccacgattgaaaagctcgagcgtttactagagcttgaacatcaaggtcttaagcaaatgatgcaaagctcaaaccgtcatatggatatgtagtataaaaaagacagcttaatgaaaatcgagtaagaagccgacctttttaaggtatttttgctcttgctgtaaatccgccaaaagcaaggtatgttctttaagccacttattgtgaaactttaagaacatactattttgcttggctgtgacctcaagttcaaaaccttggtcagtaatgcgcttttgatttagcaatactgctaagcgcaaaataacaattaactgcaatatttcgtaatgctgcatggtatgcagagctggaaaatcttctaaacggatctttttacgataaaagcggatcatacagctaaggagtgtttgttgttgctgtgtgaagcccggtaattgactgtttgctacgatatacgcactgtgtttatgtattcctgatgaattaacccctaagccaatttcatgcagctgcgcggcccaatccagtaagttgatatagtcagggtcggtaagttgccatgccccttttacctgttcaaacagccactttgcagttgtcgagacgcgattagcatgctctttatctatggcattacgctcagataggttcgctatagtattagtgcgaatatctttatgggcgagcttttgctgcatttcatgaagtaaaccttcacgtaatgagtaatcgctgtattgcatcgcgtcgattttaaatagtctaaataccgcgattaaaatagccaaaccaccacaaatactcacttgtcgctcaggtgtaagaccttcaatttgcagcgcagctatttgtttagcagcaataaactgggtttttagttctaataatcgctctaatgtgatcagctcttgctcggcatcattggcattaatcatggcaaggatagattttattgtgcctgatgttcccactacagattgccagccagccgataagtaattggcaaagatcacttcgagttcttgttcagcgcgaacctccgctttggcaaagcgcttagctgtgatttgtccatctgcaaaaaactgcttggtatagctaacacagcccatgttgcgactagcaaggagtttgtgtttaaagtgtttaccaatgatgagctcggtactgccgccaccgatatcaataactaagcggttttcatcgtgatgaatgtaatgggcaacgccttggtaaattaaacgggcttcttcttgccctgaaatcacttcaatcgggtaaggaaacatcttacttgcttgagttaagaatgaatgaatgtttttcgcgcggcgtaatgtgtaagtggcagctactttgacattctctaaagggaagtcctgcaaggtagtggcaaattgtttgagaatagccagtgagcgctcgatagcttcttggcttaagtgatttttatcatctaaaccatcagctaaataaacgcgctgcttttctttgtgtaagatttgcaaagagccatcgacctctcttgccaccactaaatgaaaactgtttgagcctaagtcaacggcagcaattgagggataatcattcattattatagttactttcccattttttaaggtggtcataaatggcaatttgcgaacgaattttcttacgattgccacggcgtacatagctgtttttttgttcgctatcgattatgcgcgcttttgttctatctttaaactgtagctcaagaatatcaattatgagctgctttaatttttcatcataaatgggtgtagctacttctacacggtgatctagattccgggtcatccagtctgctgatgaaatatacactttttcgtcaccattattgtgaaacaccataacccgagggtgctctaaaaagcggtcaacaatactaataatacgaatattatcgttaacgacagagggcactaacgaacacatgccacgcacaataatacgaatttttacaccgcgtcttgctgcaaaatagagatggtcaaccagctctttatcaacaagattatttatttttagcgtaattcgaccagcttttccgtattctacgttggtaatctcattatctatcaaggaggtaatagtttgtcttgcgttgactggtgaaatcattaagtgatcaaattgaaatggcttatagctgctttcgataaacttaaacacactatcgcactcttcactaataccttcatgcctagtaaataaactaaagtcagtgtagattttggcggttttttcatggaagttacccgtgccaatatgggcgtacttcactatgttgtttttttctttacggtgaataacgcatagtttgctgtgcacttttagtgcaggaataccaaaaataactttaacacccgcattactcagggtttttgcccattcaatattgttttgttcatcaaagcgcgctttcagctcaaccattacagttacgtgtttgccatttttggcggcattaataagcgtagaaaccaagcgagactgactcgcaacgcgataaatattgaccttaatttgggttacatctgggtcaaacgccgcttggcgtacaaactcaagtaagtggttaaaggtgtggtaggggtaatacagtaaaatatcttgctctgaaatggcatcaaacacacttgagtgattgttaaaggctgtgctttgtaatgcaggcagtggtttgttttctaaatactgacggccaacattcggaaacgcaatgaaatcgcggaaattacggtaacggccgccggggatcaacgcatcatgttggcttatattaaggcgctttttcatcactttaagcatttcagcaggcatgctctcgtcataaacaaggcgcacaggctctgcagaaatacgttgttttagaccttttgacattttatcgagcaagccttcttcaagctcgtcatctaagttgtattcggcatcacgggtcaatttgatggcataacattgaatatcatcaaagctaaaaaagctgctaaacacatcgcgaataaagtaggcgataatgtcatcaagcatcacaatggttttgtgacggcgcgttttctctggtggtaaaataacaaaacgagatacgcggtcggttggtacttccatcatggcataatgacttttttggttggtcatctcgacaaacaaataggtcatggtgtcgttgatttgatctgagtagtctttcttttcagagagtaaaatcggcaatatgtgttgcagcacattgtcgtggaagaattttttcagccaactcaagtgaaattcagatagctcctcaggtaactcaacgtgaatattgtgctcgtttaagtcatttaaaatgtctttatgaatttggttaaactttttaccaagctgcagcaccttactttggatctgatgaagtagtatttcgtcttcttcaaagttcgcatcaggaattttattaagtaatattcggcgtttaacatcggcaacacggacacggaaaaactcatccatgttgtttgagtaaatacctaaaaagcgcatgcgctcaataatcgggttagatttatctttagcttcttgcagcacgcgttcattaaatgacagccaacttagctctttggcaaagtaattgatggcttgagaagaagaatgtgatgcgttcatctggttttccaacgtttatagctagttagaatatagaggatgcagatgacgtttatgtgacgttcttatcacttttatgacatacatgtcagttttgtgacatgtatgtcgttaatttaaagcatagtttaagcttaaatacttgcttgttatgcgtcctcaatatcaacaattaagtctgtggtaatagattcaagcgcactgatcacttcgtctttgctcataccaacgggcagggcaacggttgcaacggcactgaatataggtactccccagttaggtgcgctttgttgttttgaattaaggtgagtgatatttgctcctttgtgacgaataacactggcaagctcttggacaatgccgggtctatcattaccggtgatcacaaagttaatttgttcagatttaacctcttcgagtgtttcagaaccacgctcaattctcacctccagatgaggaaggctatgtagagcatcttgcaattcttgtaagtgttcttcaggaacagcagcttctataatgcccgcaaaatgaccggctaggtggcttaagttactccctaaccaattgccattatggtttaaaattgttgctgatagatcttcaactaggccaggcttatctggccctaaaatagtaattactaactgcttcatacttaagtctcttaaaaaagcctctgtaaaatgcaatgaaaagaggaggcgttggttgatgataatttttattttgggaaaaataacacttattcagtattgttgcagatttattgtttgtccaatattttccatatagtaataaaaaattagttataacaaatcgttagcccattgtatgttagtgactcataactctaaaacaatattcatttcgcttatatttacaggctaaaaacaacacccaagcatgcagtttattacactgaaatatgacggttgtaacattactgtcatcttcgtgaaatataatccgcgcaacgttaagatttaagggtgttttgatgacttccaatccgaataaaccgacctttcatacggatagaagccgtctatttaaagaccggtttgccgagtggggtatttccgcaggcggtgtaatggtgcttatcgcactgctactgatattcttttaccttctatatgttgttcaacctatttttgagtcagcaaaagttgaaacacgtaacagtgtaaaactagataatgcctcagaaattgttggtctaggtattgaagagcaaactgaagtggcttttttactaggtgaaaaaggcaatgtcgacttttataatgtcgagaaagcgcagtttggtaaaaagatcaccactcttaatactgaattaccaagtgacgtgagcagctttgcacgctctgcaccatttcagaaccaatatggctatggcctagaaaatggctctgtggttatcgtgtcaccaaagtttttagttactttccctaataatgaacgcaagctaacccctcgcttagattatccgttaggtgatttggcgcttgaagtagacgatcaaggtgcggcgattactaagttcgcatttagccactacgaagataaaacagccgttgttgctttaaccgctgataagcgtgttttatttagtagctttgtgggtgaagaaaatatgttcaccggcgaagttgaatgggttgttgagcgcactgagcttgatattgaaggccgcgttgatgagctattaatctcacctgacacaacgcgtacttttattcgttctgcaaatcagatttatgtttacgatacgcgttatccttctgaggttgagctaattcaattgcttgcagcaaacgaagaaaacgctaaccttgtttcaacgcagctgttagccggtgctaactcactaatgcttgctaacgataacggcgaagtatcgcagtggttcgaagtaaacacggaagatggtcgtgagtttcaaaaaatccgtgcattcgaaacgactaaacaatctaaattaaatatctttacagagttttatcgtcgaactttctttaccgctggtgcaaatggtgagctaggtatttattacacaaccagtgaagcaaaactatggcaaggcaaagtaagcgaaggtccaattcaaaattttgcaattgcaccacgttctaatgcggcacttattcttgctgatgatgcattaaaagtaatcgaaattcataacgagcaccctgaagtaacctggtctgcgttatggcaagaagtatggtacgagggctacccagagccggcttatatctggcagtcaacgtctgcgagtgatgactttgaatctaaattctcactagtaccaatttcattcggtacgattaaagctgctatgtatgcgatgttatttgcagtaccgattgcactttctgcggctatttacacagcttattttatgtcgagtgaactacgtaaagtggttaagccgacggttgaaatcatggaagcattaccaacggtaatcctaggtttcttggcaggtctttggttagcgccattgattgaagagcatttaccagccatcgtcggattactggtgttgctgccaataggtatcttattaaccgcatttggctggaacaagctaccggcgtcaattcgtcaccgtgttcctgaaggttcgcattcaatcttacttattccagtggttatctttattggttggttatcatttgcgatgagtaactcaattgagctttggatgttcgatggtaacgttcgtcagtacctaactaatgaattaggaatgacattcgaccaacgtaactcgttagttgttggtattgcaatgggctttgcagttattccaactatcttctcaattgcggaagatgcggtatttagtgttcctaagcacttatcaaatggttcattagcactcggtgctacgcagtggcaaacattggtgcgtgtagtattactaacagcaagcccgggtatcttctcagctgtgatgatgggtctaggccgtgctgtgggtgaaacaatgattgtactaatggcaacaggtaatacacctattatggactggagtatcttccagggtatgagaacgcttgcagcgaatatcgcggtagaaatgccagagtctgaggtaggcagctcgcattatcgcattctattcttagcagcatttgtactattcatattcacattcgttttcaacacagtggctgagtttgttcgtcagcaactgcgtgaaaaatacagttcaatgtaggtggagagacacgacatggtaaagcagtggtttaagtctggttctccttggatttggatgaccggcggtgcagtaagcatcagtttaatctcggttcttggcttattagccatgatcgcttggaaaggtttaagctttttctggccatcagaagtagtgcaacttgagctgcagggctcagttgctaaacaaacagtgatcggtgaagtttatgaccgtgaactagttgcgaaatcacgtattgaggcgacgggcgttgatttatctcattacgacaaagagcagctagagcgcttactaatcaaaacaggtaaccgtgagtacgtagatctcgatttccgttgggtattagagacagacatcacatcgcgtactgcacccgctgaacttgcggtattcgagcgtagcaaaaacggtaacttttatggttatgttgagcaggttattaaagacggtgaagttattacagataacaagatcgaggtactttatgatcttgttgaccgtgctgttgacctaaacgaccaagcactcgatttacaaaatggtgatattggtcatatcaactatgaacttgagcgcttgcgcttaaaagaaaaagcgtatcagcttgataacgagttgacggatgagcgtgttgctgagctagcacaaacacgcgctgagctacgtgctgaatatgccgtgctagaaaaacagttatttgcacttcgtaaagaagcaaagcgtgaccaagtaacggttaaagacatgcgtggtgaagtggttactttacctctgtatcaagttcttgatgtatggttcccaaatgacatgggcttctttgcaaagcttggtcattactttgtacagctaggtaagtttgtagcggacgacccgcgtgaagccaatactgaagggggtgtattccctgcaatttttggtactgtattcatggtattactgatggcagtgattgtgactccgtttggtgttgttgcagcgatttacttacatgaatacgcagcaaaaaatgcgattacgaagatgatccgtatcgcggtaatcaaccttgcgggtgtaccttcaattgtatacggtgtatttggtctaggcttctttgtatatatgctaggtggcagtatcgaccaattgttctacccagagtcgtcgccaagcccagtatttggtacacctggtgtgatttggtcagcattaaccttagcaattttaaccttaccggttgtaattgtttcaacggaagaaggtttgtcacgtattccaagtactgttcgtcatggttcactggcgcttggtgcaacaaaagcagaaacgctatggcgcatcatcattccgatggcaagccctgcgattatgactggtttaatcttagcggttgcgcgtgcagccggtgaagtagcaccactaatgcttgttggtgttgttaagatggcaccaacactgccacttgacggtaacttcccatacgtacatttagatagaaaatttatgcacttaggtttccacatttatgatgttggtttccaaagccctaacgtagaagcggcgcgtccgctggtatatgccacggcattcttactggtatcagtaattatcgccctgaatatcaccgcgattggtattcgtaaccacttacgcgaaaagtttagagctcttgagcattaatacagaatttttataggtagacagagatgattacagttgcaccacaagtaaaccaagcgaaaagcgcggcaaagctagatttagaaaatctaacagcagaacaaacagcgttagagattaaaaacttagatctatactacggtgataaacaagcgcttagcggcgtaaatatgaacatcccgaaaggacaggtaacggcgtttatcggtccatctggttgtggtaaatcaacgcttttacgttgtatcaaccgtatgaatgacctagttgatagctgtcgtatcgatggtgagatcttacttcatggtcacaacatctatgataagagcgtagatgttgcagcattacgaagaaatgttgggatggtgtttcagcgtcctaatccatttccaaaatcaatctacgaaaatgtcgtttatggcctacgcttacaaggtattaaagaaaagcgtaaactagacgaagtggttgaacaatctttacgtggcgcagcgttatgggatgaggttaaagaccgtttacacgatagtgcatttggcctatcgggtggtcagcaacagcgtcttgttattgctcgctcaattgctatcgagcctgaagtattgcttctggatgagccaacatcggcacttgatccaatttctactttagttatcgaagagctaattaacgacttaaagaacaagtttaccgtggtaatcgttactcacaacatgcaacaagctgctcgtgtatcagaccaaactgcgttcatgtacatgggtgagttgattgagtattcagataccaatacgttatttacaacaccaagcaagaagaaaacagaagactacattacaggccgttacggttagtcaataaagtcacttggtaccgtaaacgaaatttatagaggtagacaatggaacataatatcaataaacacatttcgggccgctttaatgaagagcttgaaaatgtgcgtaaccatgtattaaacatgggtggcttagttgagcaacaactaaacagtgcactggatgctgttagcaatggtgatgcggatcttgcacaaaaagttcgtgaaaacgactataaagtaaatgcaatggaagtaaatatcgacgaagagtgcacacgcattattgctcgtcgtcagccagctgccagtgacttacgccttgtgattgcaatcgctaaaacaattgccgatttagagcgtattggtgatgaagctgagcgcattgctaaagttgcgctggactcattcactaaagatcagcaagacctattggtgaacattgaaaacatgggtcgtcaagtatcgaaaatgcttcatgatgtactcgacgcttttgcacgtatggacgtgcaatgtgcgtttgaagtgcacaaagaagatgccaaagttgatcgtgaatacgaagcaattacacgtcaaatcatgacttatatgatggaagatccacgctcaatcccgaaaattatggatttagtgtggtcagtacgctcattagagcgtattggcgaccgttgccaaaatattgctgaatacattatctactttgtaaacggtaaagatattcgtcatacatctcaagcagatatagaaaagtcgctgtaattttaaccgctacttttcattattaaaccgagcggcctttggccgctttgtctattattggtgatgtaaggcagaaaaagcgttcacaatcgaacacaatgctgtaaaattcgcagctgccaaagcatactaatttataaagggtcagttatgcctacaaatgcatttttaggggtttttgctaaatcacctattaagcctatggaagatcacatcaagaaagcacatcaagcaagtaaagcgttgatccctttctttaatcacgtgtttaaagaagaatggcaagaagcggaagaaatccgcctaaacattcgtaatttagagcgtgaagctgatgaaatgaaacgtaacatccgccttcaactacctcgtggcttattcatgcctgttgagcgtaccgatttgcttgaacttgttactcaacaagacaagattgctaacaaagcaaaagatattgcaggtcgtgtagttggtcgtgagatgactattcctgcagaaattcaagaagatttccttgcttatgtaactcgttgtgttgatgcaactaaacaagcatcaaaagcaatcaacgagctagatgagcttcttgaaacgggcttcaaaggtcgcgaagtgactttagttgaaaagatgctcgttgaattggacgcaattgagcaagacacggatgacatgcaaatcaaaatacgccgtcaattgcgcgctatagaaaatgaacttaacccaatcgacgtaatgttcttatacaagatcattgaatgggttggcgagctggctgatattgctgagcgcgtaggttctcgtcttgagctgatgttagctcgttaattaaaaatcagttcaaattcgaaaaattaaaggttcacacaatggatatcattgcaaattacggcacgttactcgttttaactgccgccgcagtcggtttcttcatggcttatggtattggtgcaaatgacgttgccaatgcgatgggtacatctgtaggctcaaaagcacttacaattaaacaagcaatcatcattgcgatggtgtttgaattcgctggtgcataccttgccggtggtgaggttacatctacaattcgtaaagggattatagatgccgcgccatttacggacataccagaacttatgatacttggtatgattgccgcgctattcgctgctggtagctggttattaattgcctctttcttgggctggccagtatctacgactcactcaatcatcggtgctatcattggtttcgcattggttgcagtaggtagcgaagcaattcaatggaacaaggtaatgggcattgtaggtagctggattgttacccctgctatttctggttttattgcttatttgattttcatgagtgcgcaaaagctaatttttgacactgatgcaccacttaaaaatgctaagcgtttcgtacctgtatacatgggtctagctggcttcatcatgtcgcttgtaaccatcaagaaaggcttgaagcacattggtattaacttaggtgctgttgaaggttatgcgctttctatcgcaattgcagtggttgttgcaatcattggtaaattcgcaatttcacgccttaaaattgaccctaaagctgacaaaaaaatgcaattcaacaacgttgagaaagtgttcgcagtactgatggtactaacggcatgttgtatggcattcgcacatggttcaaacgacgttgctaacgcaattggtccactagctgctgttgtaaacattgttgagcacaacggtgaaatcgctaagaaagcggctatcgcatggtggattttaccactgggtggtttcggtattgttgctggtcttgctattttaggtaagaaagtaatcaaaacaatcggtgaaggtatcacacacttaacaccaagccgcggttttgctgctgagcttgcagctgcttctactgttgttatcgcatcaggtactggcttacctatctctactacacaaacacttgtgggtgcagtattaggtgtaggtatggcacgtggtattgcggcacttaacatgggtgtagtaagaaacattgtagtttcttgggtaattacattgccagttggcgcagcccttgctattgttattttctacgtactgagaactgccttcggggtttaaaaaagtactaacagacttttagcttgaaaagatctcaatgccttaggtattggggtctttttatttgcaggtagtaatatcaatccgcaataatatttaatcattttgaaggataaacctgtcgctatctgcgttaaagatttctcattaagagcaacttaatagcgaaatttttgccttgttattaacgaggttttattgcctcaaaatagatcacttaattaagcgatttggtataaaaacagaatatgaataacttaccaagtataaaacagctacagtatttattagcagtccatcagcatcaacactttggccgcgcagccagcgcctgttttattggccaatctacattaagtagtgcaattcaaaacttagaagaaacgttaggttgtcagcttattgagcgtgaaaatcgcagtttaatgtttactgctatcggtgaagaagtagtagagaaagctcgtaaaattatagacgataccttaagcctaaaagagctaacaaaaagctttttgacaccgttaagcggcacgctcacccttggcgtgatcccaacgattgccagctttattgccgcgcctttatatcatttctgcaaacaaacttttactgagttagagttagtcttggttgaagataccagtgataagctactcgataaattagagcatggccaaattgatatggcattgcttgcattgccgtatgatactgacaaatttcatactcaagtgcttgcaaaagatcactttagtttggtgcatcacaaagactatacgcctgcagctggggtggaagattttaatctactaccggatgccagcgtgtttttactcgagcgtgagcattgtatgactggccatgcgctaagtgcctgccacttgaatcgttcaagttgtattaatccatttgaagcggcaagcttacatactttgttaagtatggttgagcaccagctaggtgtgactttcttaccgcaaatggctattaatgccggcattttagacaagaaagaaatggttgctacgccatcccagagcgatgcgtaccgtgatattggtattgtatggcgtaaaaccacaggccggatcagagactttaggctgtttagtcagcagttagagctgtttcttaataggcaatgtagcttagatggtcagtgtaacgaataataaaaaaccccaaataaaaaatttggggttttttgttattaaaacaaactatttttttccttccctcgactaacataataacaaaaccattaaaggcagatcagatgacgaggctagcgtgttttttcaatcacttgaaacattaattgccaaagcgcaacagggcaataaacgggcgtggttgaaattagtcaagcagcacgaaacacaggtatataactattgcctaaggatgttaagccatcccgatgatgcaatggatttgatgcaagaagtgtttatttctgtgtataaaagcttaccgagctttcgtggtgaatcgagctttaatacttggctctatcaaatagtgcatcggcgtagtgtcgaatattatcgtcgccgtaaattgcatcaaagtttggattctgcgccagaagaaagctgtgagcgtagcgagttagaaatgaatcaactgcaatccgagcagcatcatgaactaaaagaaatgatgaataatttaccctgggagcagcgtttagtggtggagttaaagttttttcagcactgtacatttgaagagatagctgagcaattaggcatttcgaccaatacagctaaatcaagactatacagtgcgcttggcaaattaaaagtgcatttggaggccgtagatggctaatttagattcattatttaccgcatggttagaaggtgagagcttaactgatgagcaaatagccttgctgcaagctaatgctgagtatgcattaatgatgaacaatgcgatgcagtggcaacaacaaagtaaagactatgaaacggtgccagtaccaaactgggacagagaatcaagtatgccgaaagtgcaaaaagctaacgtattttttggctctggtatgtgggcaatggcggcatcaattgcgttttgtgcgtggctttttgttactaatccgcagcaacaaaaccagcaattacttgagcaagtcgctaaacaaaccaacttattagagtcacaacaaaagcaaattgatcagctgcaaaacattcttacagcacaaaatgaagtgcaacagcagcagatgtaccagctggctaaagaagcgattaaaactgggcgagtagagcgccaagaagatattgccagcgtgcttgcctatatcaaaacgcagcgcgctcaagaccaagcgtacttacgtatgcagttaaatgatttagcagagcaagtggacggccgatctatgccaaccgttgccaacaacttggagtattaagatgtcaaaatacacattaacctcagctgccttattgctttgctcagccgtaagcatgcaagcacaagcaaacgatgaattagataaaattcagcgagaagtcgggatcatggaaaaaatcctcaccgcagctttaaaacaagataccgataacaaggtaagaaatgtatcttcaagctatctacaacaccaaggcgtagtatttagctttgatgtacgaggcagttcacggtggtcttcggtgtttgcgtctgtacctgacgcgcctcttccaccattgccagatatcgactttgaagaactggctgaaattgaggtgttaggtgatcatgtgcaagtaataagcgatgccgtggtagtgaaaacgcaagaagcctaccagcaagcaatggaagtgatgcgtgaaagtgctgagcgagtgcgtgatgttgctgaacaagagcgagatataagccgtgaaattcgtgatcttgaacgtgaaaaacgtgatttggagtttgaccgtcgtcacgacaaagacgccaaagatcaagagctcgaacaacgtaaaaaagagctacaagcagcaatcaaagaacttgaaaagcagcagcaaaaattatcgcaaaaacagcaagtaatgcgtaaagagttagcagaaaaaaaacaagcacgggtgaaagagcagcagcaacaattagctgagcttgtacaaaaggtaaataacagcttatcgcttaccttatgtgattatggtagtggcttaagaaacttaccaaacgatgagcatgttagttttgtcattcgtggtattagcgaagataaaagtgaacaggttaaagtgtttaaaaagtcagatattaaaaagtgtgtgcaaggtgatataaaagccacgcaactgcttgaaaaggcatcaagctataatttttagcttggctagctccccaactaaaaagcagcctagagaggctgcttttcattcattgaaaaaggtttcaagtcgggtaaaaacaataagtaaacccatacgactaaattaaaatacggcactagacctaagcctgtaaatatctttaccggataccccttgaaggttgcattacggtaacattgatacgctatccctaaatttacgaacagcaacaaaacgattagttgtgtcatcacttttctcctttataccgttaatacatgaacttattaatattaagttattttcagtatgtataatgtaattggtaatgtcatgtattttttaagtaatcactataaaaatacgacattagttcttgctgtggatttaagtatagatgagtatcgtgactttggaagtactaaaaataggtaaaaagtagcgaaaatgccgttttttttcactttataatgctagctaattgttagttaaataaattattttcagatattttttttagttcagcagaaattttttcaaccggtactgggcgggcgataaagaagccttgaccgtaatcaattccaatttcttttaatgctaaaaatatttctttattttcaacatactcagcaacagaacgcttatcaagcgaacgactaatatcgttaatggctttaactaaagcaagatcgataggatcatttagcatgtcgcgaacgaatgaaccatcgatcttcacatgttgtgctggtaattgttttagataattgaacgtgctaaatccagtgccaaaatcatcaatcgaaaagtgacagcccaagccgtttaaacgctctatcatcgcacgggttgctgtcaggtttttgatgcttgccgactcagttatttcaaaaattatgcggctcggtgccacttcatactcttctaagcttgattcaatatgcggaagcaaacgctcatctaagaatgattgcgccgataaattgatagcaatttgattaagctctggatgctttgcaacactttgaatagcatttctaataacacattggtccatcaaaaatgtgtcatttaataactctaatgcagggataaactggttcgggtaaattagctcatcatttaatttcaagcgcagtaatgtttcaaagtaagcaacatgattacgtttaaaatcccagattggctgataatgaagctcgatggcattttgttgaagagcctgacgaatactgtgcccccactctaaaccaacttgtaggctgttgtggttactgtcttctttggaataacagtggactaagtttcggcccaaactttttgccacataaagcgcgatatctgcttgttttaagcattcgctgggatcattattctgtgctgtaatttgtgtcaaaccaatagagcagctaattgagtatatttgcccttcagagtgaaattggtgtttttcaatagcaacgcaaatgctctcagcaactaagtgtgcatcaagtaagttggtattttttaagataacagcaaattcatcaccgccaatacgacaaatcaaatgctcttcgctaatgttagcggtaaatagctgggcaacctcttttaagacaatatcgccttgttgatggcctttactgtcgttaataatcttaaagtggtctaaatcgatataaataagtgcgtgctcaatatcgtcattagtgtatttctcttggcaaatacgctgtaattgttggtcaaagtaataacgattgtgcagctctgtgagtgtatcgtgtaaagctaaatggcgaagctgaagttcagcttgttttcgttcatgaatattatcaatggttgcagtgatcgtagccgagttttggctatttttaatcagttgtaagcggcactcgacccaaattgcattgccatttttgtgtttaagttgtatttcaacttgttgttgctgctcgccaccatgcaaaatactttgaattgtattttgtaacttggtttgacactctggaagacagaaatctgtgagtgactttgataagcttgattttatgccataaccagtaaggctttcccaagcaggattaatgaagcgaatatttccgtgctgatcaaattcaagaacaaccgtattaaggtgcaataaaattcgttggtgcgctgaaaacaattctttgtagcgactttggctttggcttagctgttcgaccttttgcgcaaactcagcatagctaaccataaaatcttcgcgtcgggcagcatgatcgcacaccttacttaacagtgattgatcataaggagcacggataaagtcagtcacacccgataataataactgttcagcgtagtcagcatcattattatcaataatggttacgattgcttgttttggattatgttgcaaaatttcgctgatgagtccagctgcagtatcagaatgtgactcagtggcatcaatcaaaacaatcgcaaacttatgctgtaagtatgttgctagcgtcgctttagttgaggtggtatgcgttaccgcaaagctaagttttagttgtttgcttatatcttgtgctttgcggctgtctgtttcgagtagcagtaaatttaggcggctacttttttctaaatgggttgaaagtacattggcaagtacttgcggtaacatatcttggcgttcgaatggcaatacggcatcaataccgtagcttcgcgcagtggtttcggcaatgcgttcgcagtatataggaggtgttaataggataggcgtgtttttaggtgtttttaacaatccagagcggatcatacgtgaaaagcgccagccatcaattttaccaacctcaaggccagtaataataatgtccaccgggtggcttttgagtatttttaacgcgtcctgagagtcgcttgcttcgataaactgaaatacatttagtttattgagcgtagactttaccgtctcacgttctgcaacgctagcgttcaaaattagcagttttaactgctttgccatggcgctactacctcttaacgaacccatgtttagtgaataagctagaataatgacattttgcctaatctacaagcaaactttacctaaaagcggttatttggcctttgcttgaggtagtgggcgtatcagagtaaacttggcgcgtttttattaatgagagatatgctccatgcgcgtagctgattttagctttgaccttccagatgaattaattgctcgttttcctaaagcagatcgaactagcagccgtttgcttacccttgatggcccatcagggaaaatggaacataaagtgtttagtgatattttatcacttgttaatgaaaatgatttactcgttttcaacaatactaaagtaattcctgcacgtatgttcgggcaaaaagagtcgggtggcaaacttgaagtattagttgagcgtgtgcttgacgaacatcgggtgcttgcccatgttcgagcaagtaaatcgccaaagcctggctcaaaaattattcttgaaggtaaagccgaagctatcatggttgcacgtcatggcgagctttttgagcttgaatttgccaaagacgaaaatgtattagatatcttaaatgacattggtcacatgcctttgccaccttacattgatcgtcctgataacgaatcagaccgcgagcgctaccaaactgtttatggtgaaaagccaggtgcagttgcagcgccaacggcaggcctgcactttgatgacaagttaatgacggcattaaaagacaaaggtataaatatggcgtttgtgactttgcatgtaggtgcggggacatttcagcctgtgcgtgttgactcagttgatgagcatgtcatgcactcagagtacatcgaagtacctgatgatgtggttaaagcggtagccgaaacgaaagcaaaaggtggtcgcgtaatagccgtagggactacctcagttcgctcgttagaatctgctgctaaagtgcagggcggcaaacttgatacctactttggtgataccgatatcttcatctacccgggttatcagttcaacgtggttgatgctatggtgacaaatttccacttaccagaatcaaccttgatcatgttagtcagtgcctttgctggccaagaaaacatcatgggtgcctaccataccgcaatagagcaaaaatatcgtttctttagttatggcgatgccatgttcttaacgcgaaaataacgacagtttagattttaaaaagcccagtttttttactgggctttttattttcgaatttagcccaattaatagtaataaagctgcaaacagggtagaatcgagcggttaaattatagcttgttggactgtttttccgacactgaggataatatgaaatttgaattagaccgcactgacggtaaagcgcgccgcggccgcttgatttttgaacgtggtgttgtagaaacgccagcatttatgcctgtaggcacatacggcaccgttaagggtatgacgccggacgaagtgaaagacactggcgcgcaaatttgcctaggtaatacttttcacttaatgctgcgccctggtacagaaatcattaagcaacacggtgacttacacgactttatgaattgggatcgcccaattcttactgactcaggcggtttccaagtattcagcttaggcgcaatgcgtaaaatcactgaagaaggcgtgatgttcagctcaccagttaatggtgaaaagatcatgctttcaccagaaaaagcgatgcaagttcagcgcgatttaggctctgatattgtgatgatctttgacgagtgtacgccatacccagcgactgaaaaagaagctaaagattctatggagttatcacttcgttgggctaaacgctcaaaagaaggtcatggcgataaccctgcagcgctatttggtattatccaaggtggcatgtaccctgagcttcgtgcacaatcacaaaaaggcctagaagaaattggctttgatggttatgcattaggtggtttatcggtgggtgagccgaaaaacgagatgatcaatatccttgatcactgtgcttacaaaatgccggaagataagcctcgttacttaatgggggttggtaaaccagaagacttagttgaagcggttcgccgtggtatcgatatgtttgactgtgtaatgcctacacgtaatgcccgtaatggtcacttatttgtaacgggtggcattgttaaaatccgtaatgcagtacataaaacagacacgggcccactggatcctgagtgtgattgtcatacgtgtaaaaactattcacgtgcatacttgcatcatcttgataaatgtaatgaaatcttaggcgcacgtctaaacacgattcataacttacgttattatcaacgcgtgatggaaggcttacgtaatgccatcagtaatggcaaactagacgaatttgttgcagatttttatgcacgccgcggccaagaagtgccagagcttgcagatacatcagattaaatttttagaaaaattaaagaggaagtgaaatgagtttattcatctcaaacgcccacgcaagtgcggcaggtgcagcaccagcaggtggtggcatggaaatgctaatcatgttgggtattttcggtttggtattttatttcttaatttaccgccctcaagctaaacgtgtaaaagagcataaagccctgatgagcgcaatggcaaaaggcgacgaagtactaacgcaaggtggtttagtaggtaagatcgctaaaatcgctgatgacaaagacttcatcgtgatttcattaaacgaccaagcagaagtaacagtacaaaaatcagctgtttctgcagtattgccaaaaggcactatgaagtcgctataacaataaaaataaggactcacacgtgttaaacaagtttccattatggaagtatttacttgttcttgttgtgttagtcgttggtattctgtatgcctcacctaacttgtatggccgcgacccggccatacaagtatcgggcactaaaggtactgatgctgacctcagcgtactcgataaagtaaatgcgaccctcaaagaacataacgttactgttaaatcaagcaaacttgaagacggacaaatcctggttcgttttaagaatgttgaagagcaactaaaagcgcaagatatactgcgtgattcccttagtgaagattacatctctgcaatcaatatggctccggctcaacctgagtggttaaaagcattgggtggtaacccgatgaagctaggcctagatttaagcggtggtgttcactttactatggaaatcgacatggcgacggcggttgatactcagcttgagcaaatggaacaagatttcaaaagtgacttacgtgaagaaaaactacgttatcgcactattcgtagagtagcaggtagtgagcgtctacgtgttgagatgcgtaacgaagaagacaaagatgccgcagagcgcttcttatctactcgttacccgttaaacgtatacattgatgatagcagcagtgataacgctttttttgccagcatgagcgagcaaaagctaaaagaaattcgcgattatgctatcaaacaaaacgaaactattattcgtaaccgtattaaccaaatcggtgttgcagagcctaacgtacagcgccaaggtgctgagcgtattattgtgcaacttccgggtgtacaagatactgcacgcgctaaagaaatcttaggtgcaacagcaacgcttgaattccgtgaagttgacgaaaatgctgatgcaggtgccgctttacaaggtcgtgtaccgccaggtactgaagtgatcatggcacgtgatggatacccagtggtacttaagcaacgcatcatccttgaaggtagccacattactggtgcgcaatctggtatggatgagtatcagcgcccacaggttagtattacgctagacagcaaaggtggcgcaaaaatgaatgcgttcactaaacgtgctatcggcaaacgcatggccacagtatttattgaatataagccatcaggtaaaacagatgaaaacggtaaagcacttccacctattaaagttgaagaagtgattaacgtggcgacgattcaagcccgtcttgaccgttcattccgtattactggtatcgataatccagctgaagcacataacctgagcttattacttcgtgccggtgcacttgttgcgccgattcaaattgttgaagaacgcacggtaggtccaagcttaggtcaagagaacattgaagcgggtatgactgcggttgtgctaggtttcgtgtttgtgcttgtatttatgcttttttattacaaaggtttcggcatggtggcgaacatcgctctgggtgccaacttagtattaattgtcggtgtaatgtcgcttattccgggtgctgctttaacgctaccaggtatcgcaggtatcgtattaactgtaggtatggcggttgatgctaacgtacttatctttgaacgtatccgtgaagagcttgaagatggtcgtagtcctcaacaagcggttcattttggttacgacagcgcatttagcaccattttcgatgctaatatcacaacgcttatcgcagcagtgatcctatttgcagtgggcactggtcctattgctggtttcgcagtaacacttgcgattggtattatcacctctatgtttacagccattgttggtacccgcgcggtaatcaacttattcattggcggtaagcgtattgataagttgtcgatttaggagtcagcatgcaaattttaaaactcggtggtaaaacactcccgtttatgaagttaagaaagtttgccatgacattatcaactttgttgattttggcttctttcgtatcgttttttactaaaggcttaaatttcggtctcgacttcacaggcggtactgctgttgaagtgggctttactcaagcacctgatcttaaagaagtacgtgatgcaatcacagaaagcggctttgaagatttctcggtgcagctgtttggctcaagtaaagagattctagttcgtcttgctccacaaggtgctggcgtaaaagcagaagtgattggtaaccaaatcattacggcattacaaaaagttgagccgacagtagaaatgcgtcgtatcgagtttgttggcccaagtgttggtgaagatctaaaagagcagggtggccttgccatgttaactgcacttatctgtatcttaatttacgttgcgtttcgttttgaatggcgttttgcggtaggtgcggtatcggcactattacacgacgttatcattacattaggcttattctcaatactaggtcttgagtttgacttaacgattcttgcggcaatcttggcggtaataggttactcacttaacgataccatcgttgtttctgaccgtatccgtgaaaacttccgtaaagtgcgtattgatgacaccattgaaattatcgatatttcattaacgcaaacgttaaaccgtaccttagtaacatcaatcacaactatcttagtattgattgcattatttggctggggtggtcaaacgatccacggtttcgcaactgcattactatttggtgtattcatcggtacttattcatctgtgtatgttgcttcagctgtagcaattgcaatgggtgtaagtaaagaagacttaattccagaagtaattgaaaaagaaggtgcggatctcgatcctatgccttaactgagtgttaaaaagaaaaaccgccctaaatttagggcggttttttgtttttatatacactggcaatgatatttaatcattcaagtgacaaaactagtcactaattgcgttttatcgcctaattataaacttgcttcgcctgagcctgatctaatagtgatactataatgtgctcaatagccacacctgcatagagcttactaatgtaagatttatattcattacaaaatgacgtgttttcaacaagtgcgccaaaaatgctcggttgctccagaaaagcgagcggggaaattcgcgatgcatgagcagcctgttgtaatgtttcagccatatcatcgatgatctctaaaggctctccttgttgggttaaatgcgtatcactatataaacaccatccagcaataactaaactcgcaatagcagtattaccgttgcttttgaggttttccataattgttggtaccaaaaaagtagatactttggctgcgctttgtgagcaaattcttgtaaggctatctttgatatttggatttgcaaaacgggcaattagtgtttttttatagtcactaaggtcaatacccggtacggcatctaaaataggtgtgacctctttatccataaactcggttataagcttagtgaacaaaggatcgcagattgcttgttcaatagtttgatagccgcgtaaagaacctaaaatgccaagcactgaatggctagcattaagtagacgaatcttcatcgtttcgtaaggtgttacatcatctacaatctgggcaccaacaagttcccatgctgggcgttgttgactaaacttgtcttcaatcacccattgatgaaatggctcacaagtaacaggccatttatcaataatgcccaaattcttagcaagtgctaagtcgctttgatccgttgctggagttattctatctaccatggcattggggaaacaaacatggctttcgacccaatcggcaagtccgtggtcgaatgctcgaatataagtaacaagcatttttcgagtaatgtcgccattgtgttggatattgtcgcatgactgaatggtaaatggcggcctatcggtttttcgtcgacgtgctaatgcagcagccaaataaccaaagataagcttaggtttatctgggttagctaaatcatgctgaatatcagggttagtaaagtcaaattcaccgctagatggatcgtagttatatcctccctcggtaattgttaatgatacaatatacgtttcgtcagcagccattttactaatgactgcttcagggtcgtcaggggccattagaaaatccgtcatgcagccaataacttgcacttgcgtatgtccatcagggtgcttcgtcaaaattgagtaaaggtagtcttgtgattctagatgttgttttactaagcggtctgcttcacgtaaaccaacaccacatataccccagcgtaaatcatcactacggttaatatagttatcagtgtagaaagcttggtgtgagcgatgaaatccacccacccctacgtgaacgatacctgattgcaatgcttggcggtcatattctgggactgccactgtggtcggtaatgagctcaacgtagattgctgcagtgaaattacgtccatatcttagctccttaaacttgctggctgaaaatggtttctacgatgcatcgcccagtaagctgtagcaaaatagataattgtgcaggcaaatccaatgttaaaaaataatgttcggttagcctcgtatgaactgatatcaggtgaaaagaacatggtattagtagccagtgctatcgttacacctaagcttaaccacgcaagtgttgacaatagtttggtaaatccacgctgatcaatggcgaaaagaggctctttagctgcttgctctgcatgaaattcttttacacgtgtatcaaacgcagcaagttcagcttcttgttctgggtatgaatcagcagctccgtatcttttagctaactggatataaacgatgatgctaaatatccatgttgggatgaataagtagtaaaaaggcataatgtctatcgcattcaacgtaaagccaaagacgagtcccagagcccatgataaaacagccgcagagctgtgctgaagctgtttgtatgttacccaatagcgagttaacccaagttttggaaataagaagtgctcagcaaatacaatagcgcccacaggtacaactaagagacctgcataggttaataatggcaatagtttggtaaatacaaacggaaaacatgcaatgatgactgtaactatacctactaaaaatgtggttctagttcgagattgattactaaaaatagcttgagcagcaaggcctgcacgatacaggttggcatttgcagttgtccatcctgcgacaataacgatcactaacccagataagcctagtgcgtgaaatgcaacatcgccgggatccaattcaacaatagacttcttcactaaaactgcagtccccgcgcccataatacctgcagagatccaagctatatagtgcccaaataacatgcctgcagaggtacatagcccataactttttttctttgcatagcgcagaagagccatgtctattaagccaaaatgggtaattgtatttgcagcccaagaaaagcctataacttcgagtaaaccaattccgggttcaccattggcatcaagacccgtccaaacagagatgctgccaatatgcataaagtctccccagctagagacgactgtttggccaataacagcatttgcaagctctggcataagcactaatggaccacttataaacatcacgaataaccaaggagcgcaaatacctgaaaagcgtgatacggcgttaaaaccatacatggcaacaagtacaacaatgatccctacagccagtacaaccatgacaaataaagagttagttggataccagttaagttgagccggaatatttaaagcaaagcggactgcggtcgcagaaactgtaatcatggctgcagaaataacagtaaatataattacattcgcccagttgtatagccgggtcatcgagtcaccagcaattttttgtaggtaggtatataaacttaaacgtgtttctacagctatgggggttgttatgagcgtccaactcaatacagcaagaatattaccgatcagtaatccaaggaggatatctgtcatggttgcgccaagtgcgacaaatgttgcaccaaatacaaactccgttgcagctacgtgttcacctgcatatagacctaaaaagtgcttccatcctttgagtttgtgttgtgcaatcggtaattgttcctcttctaatccttttaaatcgacctgattacttttcataagtacttgtccctgttagtcatatgacgtgctgctctttaatgttctttaaagggattcttttttattaaaacttcctaaaaatatgaaaacctcgactcaaacaaggtgtgtgttatggatcaacgcgtctaattcaactgtaataaattacctactccatggtaaataatttgtttgggcattgttgttgcctttgggcataatcctactggtgtattgttttgtcaataataagttaatgagtagataaagagaggggttcatcattcatcataactctagtgatatttaactgacttaatcttgttttttagtgattttatactgttatttgtcatttcgatgtttggcaagctcttgctgtttttattgacaaatagtatatgtgttgggaatatgctcaataggtgtttgtttgctcaaagtgaaaggtggtagtaacaatttggcgatgagtttagagcactcgagcgtaattaaaatggagaacacatacatggataacaatcaatcgattgcagtaacacagaaatcaaaaatgttgttttttcgttgttcagtgaaaaagcgacgtttaattccttcaatgtcagcgattttggttttaagttcttttacaagtcatggggctgaaacgtttgatgcacaaaaatatataacaggtgactggagcggagcacgatctgaattgtcgcagcgaggtatggattttcgtttaggctatttcaatcaggttgctcataatttgaaaggcggtcttgataatgaggtggcttatgctgaccaattttttgttggtggatatattgatcttgaaaagctttttggttggtctggggctgagtttaaagttgaaattacaaatcgaaatggtgagctaataaacaacaaggcaggtattccatcattacttcaatcacagcaaatttatggtcgaggaaatgtaactcgtctcacacaattttcattaactcaacagctgttcgatgatcagctcagtattaaagttggtcgaatttatccaagcgctgatttttttgctatgagctgcgcttttcagcatttaacattttgcagtggtggttcatctaattatttgagtagtagttggtatggtgatccattgagtactttaggggcgcaattaacgtataagttatcggataacttattatttaaaataggtagctacgatgcaaacccacaagtaatgtcgttgaaccaagggttgaagctgcatacatcaggtgatattgacggcaccaccgtggtgggagagttagaatataaagtgaactatgggcatggcttgcaaggggattaccgagttggtgtcgtgcgtagcagcttagataaagccaagcttgtaaatgaagctggctttccggccggttctactattgatgctgttgcgattgaagatacggataacgcattctattttaaccttgaacagcaaataacacgcaatccatcaggtggtggattacgggtatttgcgagtatgattcatgcagatagtagtattagcgcagtgggtgaagtgatcgcgataggagggtttattacagcgccatatgctagtcgccctaatgaccgtattggattagctattgggcgaaacagcgtcagtaaagagttaactgatgcacagcataaatataatgtaaatcatataaatagtgattttaatgtgcgtagtcatgaatacccgattgagcttaactacaattatgcaattacgcctgcgattgagttgatgccaagtgttcaattcattattcatccaaatggtgatcgcgaagaagagaatgccatcattgcgggtttacagctgagttttaacttctaatctctagttttatattgtgtgccaatagatggctgtaaaaaccaatagatggctgtaaaaaatagttaagaaatatcccgctagttttttgcaaaaccaataaaaaacagcacgattcataagtgaacgtgctgtttttttaagttttactcgcactgtgtttgttgttcagtaaggctttatttaatcgttgcttggtggttactctgtaaaaatagggtagaaatcatgtctaatacttccttgaaccctgaattttgttttagagtagtaatactattaagtttaaaacaggctatgttattaaaatttatggtatcttttaaatcagtagccagaactcaataatagctggcgcatagttgggtttgataccaataagcctgattctgtatgttaatctgcaaaatatagcaaaaacgaatagattggtgcagtgaatcattttactgttaattttttcattaatggtcaaacaggtataaataatggctttgccccctattactgaaaaccaaaaattagaggaagcagccagagctggttggctttattatgttgcaggaaaaacacaagacgagatcgctaaacagctcaatacatctcgacaatctgcgcaaagattagtggcaatggccgtatcaaaagggttaataaaagtccgacttgaacacccaattaaacgttgcatggaactggctgatttacttcaacaacgcttcggcttactcaagtgtgaggtggttccgagtgtgccgggtgatgctgattctgtcgtgggtctttcacaagccggtgcggctgaaattgaacggtacgcaaaaagccgacaagctaagacgattgcttttgggaccggacgagccttacgtgcttgcactaatgagcttacaaatatgcagtgccctcagcaccgtattgtctcgttggttggaaacatagcgcaggatggttctgctagtcgttatgatgttgctattcatgttgcagagcgtttaggggcaagacattttcctatgcctgttcctgttattgctagtacgcaagcagataaagctcaatggcaacagctgacgcatgtaaaaaatgttcatgagctcgccctacaagcagatgtatattttgtcggggttggtgacttggggataaactcccctttacatttagatgggtttattacacaacatgagcttgcggcacttgaggctatgggtgccacaggtgaagtaataagttggatatttgatagtaatggtaaactcgttcaatctgacataaaccagcgtgtaacgagcgttgctttgtctactcgtcgagacaaacatgtaataggaattgctgcagggcagaacaaggttccagccattgccggggcaatagagtctggtatgatcaactccctcattacaaatgagtctactgctgaagcgttattgcatttataaatgctattagcgagaggccttgcttagttagtttgcgttgcttttacttgaaggcatctcattcactcacttgcaaagataaattaaatgacgaggcggtaatatactgttatttatgagaaaacttatgaaaaagctaatgctgagcgcgtgttcactttgtttgcttgttgcatgtacagaagagccatcaccccagcagcctgaaagcagcaatacaagtggtgatgtgcgacagcaattagatatgtatcaaaacctagcttggcatgtagtcagtttattacaaagccaatctacgccaacgcagataagtgactcagtaacaactttaatcggctcatcaaagcagttgtttgtaaatcttaaagagcaactgccagaatgcgaagaaagtctaaacgttatggcgcaaattgccatgattaaacagcaacatatagagatagaaaatggcgggtctcaagaagagctccccaaactacctgaattctcagcgccgagttgctaccacgcacaaaagctattacttaatccacttgcggtctatacactaactcaacaagcagatttagcacagagtgattaccaacacgcaaagttaaaaatgattgatagttttgcacgcatcaagcagatagaaatgattgctgctgagtagtcattgctagtcatagccttgccataaaattgtcatacaaggttgctaatttagtcgcctatttgtattactgatgctaggtgtaaggtgagcgcacaactaaagcagatcttagataacagtgcaattgaaaccttgtttcaacctatctttgatatttctaatcaacatattttgggctatgaggcgttaagtcgtgggccaaaagattctcagttagaaatgcctagtgcattgttcagcgaagccattgcttgtcataaaatctctgagttagagttactttgccgcagtaaagcgattgagaactttgttaagcttaacctacaaggtaagttattcttaaatgtaagccctaaaactttactcgatccgtgtcatccaaaaggtgaaactttgcaccttgttgagcacttcggtttagctgctaatcgtgtggttatcgaggttacagagcaagaaaaagtcgatgatggctttttattgttaaagactattgcacattatcgtgagctaggtttttcgattgcaattgatgatttaggcgccggctattcgggcttaaaacaatggtctgaattatgtcctgaatttgtaaaaatagaccgctactttattgatcattgcgaccagagtgtggttaaaaaagaatttttaaagtctattattgagcttgctaaagcaaccaatacgcaagtaatagcagaaggcattgagcgtgtagaggagcttcgtttactcgaaagtctaggggtacagcatgcacaaggctttttgttagaaaggccaagtttacagcccagttacgaaattaatattcactgcctaaagcatttagaatcatcagatactgaaagtaattttgaacagtctatggcgattggctggttagcagttaaacatgcaagtattgaatcagcaacccgctgtaaagatgctcataaaatttttgagcaagataaaaccttaacgagccttgcggtactagagcataatattcctgttggtttattacaccgagatcaacttaccgaagtatttgctgccccgtatgggcatgcgctttatgataagcaacccgttacttctttaatggataaacagccgttagtggtagacgaaaacgagttactcgatacggtgagtcagcaaattaccgaatttgagtttgatattcgacgccacattgtgatcacccgaagtggtgaatacttaggattggcacccctacgtaatattttaaagcacattactgaagaaaaaatccgccatgcacaacatgccaacccgcttacaatgctgccgggtaatgtcgcgattaacgaagcaattgagctaaggcttcgcaataattatccgttctcgctagcctatgttgatttaaaccactttaaacaattcaatgatctgtacggatacgccagtggtgatagcgtaataaagctgcttgctgaggttattgtcgaggcgtgcagcacgagtaaaggctttgtgggacacattggcggggatgattttatggtcgtgtttgataaaaatgatgcagagcaagtgtgccatgacatcattaataaatttgagcaccaatctcgcgcctttttcaccccagaacatattgagcaagggggttattgggcaagtaatcgagaaggtaaaaagcagtttgtgcctttacttacactatcgatagggttagttaagccagatttagagctgtgtattaatagtcatcaggtagctgcgctggcgacagatgcaaaaaaagaggctaagcgttatcaaagtagccatttatttgtttgccaaagaaggcgaccagcacctgctgttgtgcgccttagttgtgcgaaagatgacagtgcatctgtcggactatgaagaaaatttaagtttagtaagttttgcttgtgtctacatttgagtaggtgtagcttaaaaaaaacactatcaaaaaataacaatgaagcgactatgtagcgcaattttagtattgcttagcctaggatacagccttaccacagaagcaaaaaatgtggtgaatttagcgattgaacagcgcccgctctacaagcgtgattattatcttcatgaattactggcagcggctttacgtgctggtaattaccaagcagaaattaatgaggtattagtacaccctcatcaacaacgtaccttactgatgcttgatgcaaagcaagcagatatattttggagcatgacaagccctgagcgagaacaccttgccattgcagtacctgtgcctttgttcaagggttatattggtaagcgagctctactaacgaaacgtgcatttttaccacttttcgaatcagtaaaaactaaacaagacttagcgcctttaacggcaattcaagggcatgattggccggatacaaaaattcttgcgcaaaatggcctaacagtcaggccgctggcaaattatcaagcgatgtttagtttagtgatcagagggcgagttgattattttccgcgttcgttcattgaagtgatctctgaactagagcaagtgaaaagtgatgagctggttatagtgccaaacttatatatcagttatccaacagcattttacttttttgttagtaatcacaggcctgaactagctgaagtgttaatgaaaggactgacaacgatgaaaagcacgggcgagtttgaacagttatttgctagctacttcgctgaagacttagctaaattgccgtttaaagaaagtgaagccatagaaataaaactcgataacgattattttcagccacaaaaaaaggagccttagctcctttttagataccaattcgcttaattaaataatattgcgacttggcataattacaaccgctattagcgaagtagtgactcagttaacactgggcgaatttcacgaatgatcgcttgagttaacttaggtgcaccacaaatgatgttgccgctttggttgtagttaataccacctgcgaaatcaacaaccataccgcccgcttctttaactaaaagctcgcctgcggctgtgtcccatggcttaaggccaatttcaaagaaaccatcaacacgacctgctgcaacgtaagccatatctaatgccgcagaacctgcacggcggatatcagcagtgtgtacgaaaagcgctttaaacgcttcagagtatgcgtctaagtggtgcttttgtttgaatgggaaaccagttgcaagtacagaacctgctaactcgttagttttagttacgcgtaaacgtttgctgttaagctgtgcgccttgaccacgtgatgctgtgaataattcaccacgaattggatcatagataacagcttggtctaaacgacctttaactttaagtgcaatagatactgcgaaatgagggatacccttgatgaagttagttgtgccatcaagtgggtcaacaatccattggtaatctgcatctttacctttgtgctcaccaagctcttcaccaacgatacaatgatcagggtaagattttaaaatagtgtcacgaattgcggcttcagcttctttgtcgatgttagtcactaagtcgttagtgcctttttgttgtacatcaacttttgataaatcttcacttgcgcgaagtaaaattttgcctgcgttacgcgcagcgcgaaccgcaatgtttaacattggatgcatagcattacctttgggttgtaaaagaacgaatatatttaagccggcgtattctagcgatttctagcgtaaagtaaacaataaactcgaataaattaggttgttttttgtacagggttgaaatgcaaggggatcctattggactacagcggtaagctattagtttgatgttgaatggtgttgcgggttgagcattttgtctaaggcctacctcgtaggaagtacgttaataccaaatatatgtgcacaaagagaagtgaatgagaagacaaaggaaaccacagattttttcttcctctaaagcgctgcgtctcttatcctctttgtgaacatttggttttctctgtggagcgcgaagcgcctctgtgctctctgtggttcaaatatgttttgcacaaagagaagtgaatgagaagaaaatgaggaagcgataatcatgctttttgtttctctaaagcgcagcgtctcttatcactctttgtgaacatttggatttctctgtgtagcgcgaagcgcctctgtgttctcagtggttcaaatatattttgcacaaagagaagtgaacgagaagagaaagaggaaaccacagatttttttcttcctctaaagcgcagcgtctcttatcactctttgtgagtcataggattattgcgcgatgtaaaattgcgccttaccgcttaccgttcaaagcatatcgcctagcgcttgcagccatgttataatccccgcaatttttgactttcagtaagtaacaacgcaatgacacttgatgatattcgtatcgtattagttaacacatcacattctggtaatattggctcagcggcacgtgctatgaaaacgatgggcttatcaaatttatatcttgttgatcctgcttgtgaaattgatagtcatgccagtgcgcttgcagccggtgcaactgatgttttaggtaaaacagtggttgtagatacgctagcagatgcaattgccgattgtagtttaacaattggtaccagtgcacgctcacgtacattatcttggcctatggttgagccgcgtgaatgtggtgaaaaattagtagctgaagctgagcacggtcctgttgcactggtatttggtcgtgaaaatagtggtttaacaaacgaagaactacaacaatgtaattaccacgtatgtattcctgccaaccctgaatatagctcgctaaatctagcgatggcggtgcaaacattgtgttatgaaacacgtatggcttatttaaataaacagccaaaagtacaagaagaagacgaagcaacctatccaaatgcgaagcaaactgagctgttctacgagcacttagagcaaacgctaaacgacacggggtttattatcaaacaacaccctggcatggtaatgactaaattacgtcgtttatttaaccgcgcgcgtccagaagaagctgagatgaacatcttacgcggtattcttacctccattaataagtctataaaataatcacaggttataagtataatacttgactaaattactcaggtaattacaatatacccagtacttgactatttttgtcaagtattcggttttatcaatggcaagtatcaatttttatcaagtgataatacttgactattttggtctggtaattaaaatttgcacaccttagcgtgcagtaacatcgggggctccatgaagttaacatcaaaaggcagatacgcagtaaccgccatgttggatgttgcactacatacaaatgtgggtgcagtgcctcttgccgatatttctgaacgccaagagatttcgttatcttaccttgagcaattattcgcccgtttacgtaaaaatggccttgtgacctctgtgcgtggcccgggtggcggatatttattaggtagagaagcaaacgaaatttctgtcggcgatgtgattaatgccgttgatgagtctgttgatgcaacacgttgccacaacgcaacgggtggctgccaaagcggcatgcgttgtttgactcataccttatggtcggacttaagcgcacgtatcgaagagtttttaaatagtattacccttgctgaattggtggaaaagtcagatgtgaaagaagtcgcatcgcgccaagataacagcatcaacactgcaattaagcaactggaaaacattcaagtaagctgtcaactgtagcttgacgaaagcggagagagaaatgaagttaccgatttatttagattacgcagcaaccacgcctgttgatgaacgtgtggcaaaagaaatgatgcaatgcctgactatggacggtaattttggtaaccctgcatcacgctcacaccgttttggttggcaagcagaagaagcagttgatcaagcacgtacagatatcgctgatctgatcaacgctgacccgcgtgaaattgttttcacttcaggtgctacagaatcaaataacctagcaattaaaggtgctgcgcagttctataaaaagaaaggcaagcacgttatcactgttaaaacagagcacaaagcagtacttgatacgtgtcgtgaactagagcgtcaaggtttcgaagtaacctatatggacgttgaagaaaacggtttacttgaccttaaaaagcttgaagctgcaatgcgtgacgacacagtacttgtgagcgtaatgcacgtaaataacgagctaggtgttatccaagatatcgcgacaatcggcgaaatgtgccgtgagcgcaaaattatgttccacgtagatgctgcacaaagcgcaggtaaagtacttatcgacgtgcaacagttaaaagtagatttcatgtcgttctcaggccacaaagtatatggcccgaaaggtgtaggcgcactttatgttcgtcgtaagccacgtgcacgcttagaagcacaaatgcatggtggtggtcatgagcgtggtatgcgttcaggcacattggctactcaccagttagttggtatgggtgcggcatttagaatcgctaaagaagatttcgaaaaagaccatgcacacatcagcgcacttcgtaagcgtttggttgatggcatcatggctgatatggaagaagtttacttcaatggtgaaccaagccagtcagttccaggtattgtaaatatcagcttcaactttgttgaaggtgagtcgttattaatggctgttaaagacattgctgtttcatcaggttcagcctgtacctcagcaagcttagagccttcttatgtactacgtgcattaggccgtaatgacgagttagcacacagctcaattcgtttcagcattggccgctttacgactgaagaagagattgattacaccgttgaactaatcaaaaactcgatcggccgtttacgtgagatgtctcctctatgggaaatgcatcaagaaggtattgatttagattcagttgagtgggcgcatcactaatttagtgatcgccgccgctagcaggtagtgaggatagtattatggcttatagtgataaagtaatcgatcatgttgaaaatccacgtaacgtgggtgctttagacaaaaatgatccgtcggttgcaacaggtatggtgggtgcaccagcgtgtggtgacgtaatgaaattgcaaatcaaagtatcaccagaaggtgtaattgaagacgcaaaattcaaaacatatggttgtggtagcgcaatcgcttcttcttcacttgtaactgagtgggtaaaaggcaaaacattagacgaagctgcaacaatcaaaaatactgatatcagtgctgagcttgagttaccgccagtgaaaattcactgttcaattttagcagaagacgcgattcaagcagcaattgctgattacaaaagcaaacaagcgaagtaagagataaattcatggcagtgacattgacagatgcggcagcaaaccgcgtagaatcatttttagcaaatcgcggcaaaggcattggcctacgcgttggcattaaaacgacaggctgttcaggtcttgcttatgttcttgaatttgttgatgagttagctgacggcgacgaaatttttgaaagccgtggtgtgaaggtgatcgttgatgccaaaagcttagtctacattgatggtactgagcttgattacaccaaagaaggtttgaatgaagggtttaagtttaataacccgaaccaagccgatgagtgtggttgcggcgaaagctttaccgtttaagcttaaaaaatttctttgcttgaagccctgcctatgtagggctttgttctttcctgtttaccgagttggattatgtaatgcgttactttgagttatttgcaattccagtagattacaacattgatttagcgactattaataaacactaccttgagctacaacgcgcagttcatccagatcgccacgcaagctctagcagccgtgataaattacttgctgtgcaaaatgcagcagaaatcaatgatgcattacaaaccttaaaacacccggtaaaacgcgctgagtacatgctaagcgagttaggtgttgatattcgcgccgagcaacaaacattgcaagacccgctattcttaatgcagcaaatggaactgcgtgaagaattagaagaacttgaaaatgccgcagatcctgatgcagcaattgcccagtttgaagcgcaaattaaacaactcgataagcaatacagcagcgaattagccgaacagctcgcaagtaatgatgagcaacaatggcaagctgccgctgacaatattcgtaaattgaagtttgtttataagttacgcgatgaactagagcgtattgaagacagtttatttgatgattaatcgttagttgtattaaagcagctatttaagagtttaaaaagagcattatggcattattgcaaattgctgagccggggcagagcgcggcaccacatgagcacaaattagcagtcggtattgaccttggtacaactaactcgttagttgcaacagtgcaaagcggcgaagcacgcacactgactgatttagcaggtaatgcgatgctaccatcagttgtacaataccaagctgatagcatagtggtcggtgaacgagcggcagcagctgcaactcaagaccctgcaaacacactaatttcagttaagcgttttttaggtaaaactcaggccgaaatcgaaaaaagctatggtcaactaccgtatgaattctgtgagcatgatggctcgttagcaatcagcacggttgcaggtgcaattagtcctgtaactgcatcgagtgaaattttaaaagcattaaaactgcgtgcagaagatagctttgcaggccaagacattatgggtgcagttattactgtgccagcctattttgatgatgcacagcgtcaaagcaccaaagacgctgccgagcttgctggtatcaaggtattacgtttattaaacgagccaacggctgcggctgttgcttatggccttgattcaggccaagaaggcattatcgccgtatacgatttaggtggcggtaccttcgatatttctattttacgtttacaccaaggcgtgttcgaagtaatggcaactggcggtgactcaagccttggcggtgatgattttgactcgctattagttgattacttcaaaaagcaaacaggtgtgagcgagctttctgcatcggtattgcgtttattcatcaataaagcaaaagcgtgtaaagaagcactaagccaataccaaactgtgaatgtaggcttagagtttgatggtaaaagccacaaagttgaagttactcgcgaaacgtttgatgagcttgctcttagccttgtgaagaaaacactgcgttcttgtcgccgtgcggttaaagatgcgggtatcgagaacgaagaagtactgcaagttgtaatggttggcggctcgactcgtatgccaattgtacgctctcaagttgctgattttttcgataaagagccactgacttctatcgaccctgatcgtgtagttgcactcggtgcggcattacaagcagacgtactggttggcaataagccagattcagacatgttgctattagacgtattaccactatcgctaggtcttgaaaccatgggtggcttggttgagaaaatcattccacgtaacaccacgatccctgttgcacgtgcacaagagttcaccacttttaaagatggtcaaacggctatgtcactgcatgtattacaaggtgagcgtgagctggttgatgattgtcgttcgctggctaaattcagcttaaaaggtattccggcaatggcagcaggtgctgcgcacatccgcgtaacctttaaagtagatgctgatggcctattaagtgtatcggcaatggaaaaatcaaccggtgtacaagctgaaatccaagtgaaaccatcatttggcttatcggatgatcaagttgcaaacatgctcaaagaatcaatgactaacgcaaaagacgatatgcaagcgcggatgcttaaagagcagcaagttgaagcgttacgtgttgtagaagcgcttgaagcatcactcgcaaccgacagcgcattacttgatgaacaagaattaggtgcgttaaaagcagaaattgctaaacttgttgccgtacgcgaaactgcaacaacacctgcagaaattaaagcagcgattgaagctgtagacaatgcaagtagcgaatttgctgctcgcagaatggatgcatcaatcaaaaaagcgctgcaagggcagtcagtagacgaagtttaacgaggtaaggtatgccacaaattatttttcttccccatgcagaattatgcccagaaggcgcagcaattgaagcacctgcaggtgaaacagtattagatgttgcactaaaaaacggtattagcattccacatgcttgtgaaaagtcatgtgcgtgtacaacatgccatttaatcatccgtgaaggctttgactctttagatgagagcgatgagcttgaagacgacatgctagataaagcatggggtctagagcctgaatcacgcctaggttgccaagcaatcattaaagatgaagatttagtggttgaaattccaaagtataatctcaatatcgttaatgaagagcattaatttttaacggctttgatttcgtaaaaaccgctgtagttgcttagtctctacagcggttttttgttttttagagctttaaattgtaagttttatgccttaagttgctatttttactccctgtaaagcaggtgcacgttcaatttacttatcgcttaaagcttgtgacttaaagctgattttggaggttctatgtctgatttagttttttctgattcgtttatcgacggtgacttttattctacgagccagcgttttagtgtagataaccctgcaaccgcagaagcgattactcaggtctctaatattgatgaagcaggggttgaactggctataaaaagtgctgacgaggcatttagtaagctaaagcaaacaacagcaaccgagcgcagtgaaacgttgcgccgttggtacgacttagtcattgagcacaagcaacaacttgctgaattgatgactaaagagcagggcaagcctttaaaagaatccttgggggaagttgaatacggtgcaggctttattaaatggtttagtgaagaggcaaagcgcagttatggcgacacaattcctgccactgacagcaagcatcgtttaacaacgataaagcaacccattggtgtggtggctggtattacaccttggaatttcccgattgctatgatcactcgtaaagtggcacctgcctatgcagcgggttgtagttttgtgattaaaccttcggagcatacgccattatgcgctattgccttagcctaccttgcagataaagcaggttttgtaaaaggagcgctgaacgtagtggtctctgaaaacgcaaaaatggtgggtgaggtcatgactgaatctgagcgtgtgcgtaaattcacattcacagggtcaactggggtcggtaagcagttactagctcagtgcgcttcaacaattaaacaaacgtctatggaacttggcggcaatgccccatttattatttttgaaaatgctgacttagatgaagcggttgctggcttaatgggggctaaattcagaaacgcagggcaaacttgtgttgccgctaaccgaatttttgttcagcgctcagtgcttgaaacggtgcttgaaaaactcactgacaaagtagctgagttaaaggttggcaatggtcttgatgacggggtggatattggcccattaatttaccctaaagcaaaagaaaaagtgcaaacactggtgcaagatgcggttgataaaggggcatcgttaatcggtgataacagcgagcttgaaggtagcttccaagcaccattaattttaactgatgttactccagagatggatatttatcatgatgaagtgtttggcccagttgtgagcataatcacctttgatgacgagcaagaagtacttcaacttgctaacgacgttccttatggtttagccgcatatttttatagtgaaaacatcaagcaggtttatcgcgtaagcgaagcactcgaatacggcatgataggtattaacgaaggtcttatctcaaaccccgtagcgccatttggcggtgttaaacagtcaggcttaggtcgagaaggcggtcaccaaggtctagatgagtacctagaagagaagtatctttgtgttaaaatttaagccatcagactgataactaagtccttgcgcgtgaaataaatttcacgcctacattaaagagaactaatcgcacaaagaggataagaggcgctacgctttagaggaagtaaaaaaatgatcttttggtttcctcgttcttttttcattctctcctctttgtgcaattactttcgcgtgaaataaatttcacgcctacattaaagagaactaatcgcacaaagaggataagaggcgctacgctttagaggaagtaaaaaaatgatcttttggtttcctcattcttttctcattcacttctctttgtgcaaaataaattgaaccacaacacagattacacggaggcgctgcgcgctacacagagaaatcagtgatcacatagatattatgaggcgctacgcttaatagaaacatctctctttcttttcctctgtgctctctatggcctctgtggttagaaaaagatctttaattcacaaagagagtaagaggcgcttcgcttaagagataaatatttctttgttttactcattcacttctctttgtgcaaaaacatttaaactacaaacaacacagttccccttcaaacttgccagcttacggcctaaagctatcaactcctcacctttattttcataaaatgatagcgctgtcattttagtttttatatgataggaacgaattattaacaaaaatgaaaaatagtacgcagaaataccgtacactcagggcttaaacgaggagaaagtaatggattttaagaagtcactattcgcggtaatgctagcgactgcgcctttaatggcaagtgcagcattaactcaatcgcaagttgatcagtttgcgaaaggtaccgaactgctgttttcggtagaagataactttcgtaataaagatgcgggctttttaggaaaaatcaccctcaataatggttctgatgtggcgttacctgcaggcgagagcgactggcagctttatattcactcagttcgtaaaatctcaaccgagcatgtcgcgggcctaaatattgaacatgttaatggcgatttacatcgcatcgtaccaacgagctcatttaaaggtttagccgcaggtgaaagcttggagctgccatttgatgcacaagtttggattgttgcttacagtgactttatgccacgggcattttttgtttcaggtaagaataaacctgccgtatttgccaacaccgacactgaagactttaaacagtttgttacaccatttacccgcgaaaaccagttacgtcgttacaatgagccaaaagatttatcggttttagcaacggcaaaagtacgctacgaacgaaataacgctgataaggtgtcggttagtaaagacgatgccttaaagcgtattattccgaagcctcgtaaagttgagtttaatcgtggtagcgcaacacttaataataattggcaaatcagttatcaaggtcagcttaaacacgaagttatggtgtttatgcaagacttacaagatgactacggcattagccttaaagcacagcctgatcacatcaatattggcaaagacaaagttattcgcttaaaagttgaccctaaactcaataatgcaaaagctgaaagctatacccttgagattgacgatgaagttatcaccatcataggcagcgataacgccggtgtgttttatgctatgcaaagcttattgaacctcattcctgcaaacagccaaggcagtgccagcttaccgcagttagaacttgaggactcaccacgctatggctggcgtggcatgcattacgataatggccgtaactatcatggcaaagaggcaatgttcaagttagttgagcaaatggctcgctataaaatgaataagctacactggcacttttcagaagatgaaggctggcgacttgagatcccaggcttaccagagctcactgatgttggcggttatcgctgctttgatttagaagagcgcgagtgtttattaactcagcttggcactgggccgtttaaatcaggctcaggtaatggttatttgaaacgtgatgagtttgttgagctattaaaatttgctaaagaccgccatattcaaatcatccctgaagttgaaggccctggccatgcgcgggcctcaatcaaagcgatggaagcgcgttatcacaatatgctagagcaagctgagcaagcggctaaaaacaatattaaaactcgctctgcaaacaaagaaattcaacacatagatatggggccagcaacgcaatacttgcttaccgaccctaaagatacctctgtgtacatgacggtacaaaactacaaagataactcaatgaatgtgtgtatggactcaacctacgcatttttagataaagtgacctatgaacttcagcagatgtatcgcgaagcaggtgttcagctaaagaacttgcatattggtggtgatgaagtcggtgctggttcgtggataggctcgccaatctgtcaggcgctatttgccgatcctaataacggtgtatctggcccagctgatttaaaaccttacttcacacaacgtgttgcaaccttacttgaaaagcgcggtatttctccgggtatttgggaagatggcatcatgtatgaccgtgaaaacccatttaaacgagatgaatttcctaataaaacctttaccgttaatacttgggataacatttgggaatggggcgttgccgatagagcataccgcctagcaaatgccggttaccaagtggtgttatcacacggtacgcatttgtactttgaccacccatacgaagcaagcccacaagagcgtggttattactgggccactcgttacacagatactaaaaaagcctttaattacatgcctgatgacgtgtatgccaatgccgattacacccgcactcgtgagccaatcgttaatttagaagcgttggttggtcgcccattacctaaacttgaaaagcctgagaatattctgggtatgcaaggtcaggtatggtcagaaacaatccgtactgaagatcaagtattagcaatgatcttcccgcgtattttgtctgttgcagagcgcgcatggcacaaagcggattgggaaggcgaaagtgtcgatagtaaaaaacaagcaaaagactgggctgagttctcaagtgcagtcggtttgaaagagcttgataagttagccaaagatggcatcaatctgcacttaccagtaccgggcggcgtgattgaagatggtaaattatatgccaacagcgcatttgcttatttgactattgagtacagtctagataacggccaaagctggcaaacttacgttgagccagtaaaggttaataataatgcaaaagttgcgttacgcacccgcttgaacgcacagcaaaccagccgcgtaacagttgttggtgagtaatatttttgcgataaataaatgtgacgcttacagaaaaaagtaggcgtcattttttgttttcctcattcttttctcattcacttctctttgtggaaaaaattattgaaccacagagtgcacagaggcgctgcgcgctacacaaagaaaaccaaatgattacaaagaggataagagggcgctgcgcttaagagaaagtaatgttttggctctctcattctcttctcattcacttctctttgtgcaaaaaattattgaaccactgattgcgcagaggcgctgcgcgctacacagagaaaaccaaatgatcacaaagagtataagagagcgctacgctttagagaaagtaatgtttaggtttactcattctcttctcatttacttctctttgtgcaaaaacatatttgaaccacagagatgtatggactcccctcccacaggggggtaacgtaataagcgacaaaacttttacaaaaggagtccatacatggtgaatcttaacgttattgcgattgatttagcaaaaaataattatcaagtttgtaaaataggtaaagagcgacaagttatatacaacaaagaagtatctagacaaaaactacttcagttattggtatcagaaaaacaatcattagtagcaatggaatcatgtggtggtacgcattattgggcaagaaaagcgaaagaggctggccatatagttaaaccaatgtctgcacgcgtcgtaaaagcatttagacaaggccaaaaaacagatgcgaatgatgctttggctattggtattgcagctcagcaaccaacggttaagccgagtagattattaagtgtaaatgagcagtgcttacaatccatatcagcaatgagagagcattttgtaaaacaaaaagtggccttggggaacctacagcgaggctgtttgttggaacttggcatccctatagccaagtctgatagtaagttaatagatgcagtggaaagtttgctcgaggatacaagttttaatgtaccgatggcatttagagcatctctaaaaatagtaaatgaacaattcaaaagagttgttaaagaaattatagcgctagaaaagctaattgaagaagaaatcaaaaatgatgcagtatgcgagcggctgtcaaaattggaaggcgttggaccagtaggttcaatgatgttgaaagtttactttagttgtatagagcactttaaaaatggacgagaagcgtctgcctgtgcaggattaacgcctgtgcagcatagctctggtggcaaagaaaaaattggctcaatttcaaaaaaatcagcaaacaagaagttacgtagcacgttatatcaaggtgcactagcggttgtttcaaatgttataaaaagagcaagtcgcacagaaaaggatgaatggcttaaaaagttgattgcaagacgcggtaagaaagtggcagcaatagcattggcgaataaaacaatcagaactgcatttgccatgctaaagaaaaacgaatgttatcagccaaagttgttaacggcttaaattattgtcaataaagagcgtttaaaaccagggtaagactgacctttaagagactgttccgtgttcaggtagaaaataccgtcacagagaaaagtcataaaggggcgaatacattaaagtgaccaggggtagctccccaaatagagtccgtatataagccagcatctaatctttatttaataaatactccgttgacaaaaaacggggagtccatataagaacattgaggcgctgcgcgctacacagagaaaaccaaatgattataaagaggataagaggacgctacgcttaagagaaagtactgttgtggttttctcattctcttctctttgtgaataaaccttcgagcgaaataaatttcatggctacggtatctaaataagtatgtcagcgctgtcatttttgttgcgatagtgttataaatatttaatatctcttttatataatcatctgaatgaacagtattgcagaatcgctgtgtgctgtgagtgggaaatgttatgtcagaaacgaataaacagagcagtattgtgccaatggcgattgtggccacactgttttttatactgggttttgctacatggttaaatggctcattgatgccgtttttacagcaagttttgcagctttcaccgtttcaggcatcgctgattattttctcgttttatatcgcagtgacttttacggctctaccttcagcaatgatcatcagaaaggtaggctataaaaacggtatggcgctaggtatggcgaccatgatggtggctggtttactatttattcctgctgcaaaaacgcaggtgtttgcactatttttatttgcacagcttgtgatgggagctgggcaaacattgctacaaacagcggttaatccatacgtcgtaagaattggcccagaagaatcagctgcggctcgcgttagtattatgggtatattaaataaaggtgcgggtgttgttgctccaatcgtgtttaccgcactgatactcagcgattttaaaggctttgtaggtaaagagcttagccaaactgatattgatgctatggcaaatggtttaatattaccgtatttagggatggcaatttttattggtatacttggttttgcggttactaaaatgccattgccagagttgatcgatgattctgatgaacaaaaaccggggcaagtaaaagaagcgctgagccatccaagtcttgcattaggcattgtggcactttttgtttatgtggccgttgaagtaattgccggtgatacgattggtagctttgcgttgtcattaggtgttgaaaaatatagtgtaatgacgtcatacactatgggttgtatggtgctaggttactttttaggggtgttacttatcccacgcgtgttatcacagcaagcagcgttgactatttctgctgtattaggttgtgtgttaactctagcgattgttactggtaataatgaaactgtatttatatcaacactgtttggcctaaaatcggtactgcctgatacactattgctcattgctgtgctaggctttgctaacgccattgtatggcctgcagtttggccgctagcattatctggtttaggtaagctaactagtgtaggctcaggtctacttataatgggcatagctggtggcgcattcggcccgttattttggggtttggcaagtggcggcgtaaaaagcgcagaagcacaacaaatggcttatattgtaatgttgccttgttatttattcatacttttctatgctgttaaaggtcacaagatgaaaagttggaagtaattatgggtttgaggttaggtgtaaagtgcacagccttgaactttgaaagcatttctagtaaatagaaataatcccgtgtgtaatgccaccgaaaggtggcatttttttgcctgcagtttaagagccgcgctgcacagagaaaccaaattatcacaaagagattatgagacgcttcgcttaagagaaagtattattgtggcttcctcattcatttctctttgtgcgtaaattaattgaaccacagagtacatagaggcgctgcgcgcttcacagagaaaccaaatgatcacaaagaggataagagggcacttcgcttagaggaaaacaaaaaagcattattattacttcctcattttcttctcattcacttttctttgtgcaaaagaaatattgaaccacaaacaaccccgaacagccaaagctgacggcttttagaattgaaaataggcgttaaagataaaacttaataatgaaattaaaatagaaaatattagtgaaatatagggatttactaagggggaagagtggggcgactgatggggcttgaacccacgacaaccggaatcacaatccggggctctaccaactgagctacagccgccactgagatacacctcgtttggtgtggcgcgcatattacataattaagtttagcttgtgaagccctaaattgaaaaaagtagaaaaaacttacttgcctcagaaaattcagaatcgccaccttggtcagcgggcgttcagttttgcagattagacttgcgttttttgtaattaggcaaatactcatttcttagttttgcgcgtaatttaatgattttttaaccaaagatcatatataatttgtacagcgttatgctaaaaatgaacttcaggagagaacatggatacaataatgaactggatcaacgagaattcaggtttaatcatacattacgccgttcaggcggttctagcgctaatcattttcttcatcggtggtcgcatcgctaaattctgcgaaggcttaaccgaaaaagcatttgataaaaagaaagtagataaagctgtaggttcatttgttgctagcattgtctatgcaattgtatttgctgcaacaatcttaatggcactatctcaattaggtattgagacaacgtcattcattgctatcttaggtgcggctggtttagcagtaggtttagcattgcaaggttcactgtctaactttgcatcaggtgttttaatcattttacttcgcccattcaaatcaggtgactatgtagaagctggcggtaaagctggcacagttaagaaaatcgaaattttctctacagaattgcgtacacctgataacaaagtaattatcatgcctaactcatcaattatgggcagcccaattaccaatttctctcgagaatcaactcgtcgtatcgatttagtaatcggtgttggttacgatgcagacttaaaagaagcaaaagcagttcttaaatcagtgttagataaagaagagcgcttattaaaagacccagcatacacagtagctgtatctgaacttgcagattcaagcgtaaactttgtcgttcgcccatgggttaactcagctgattactggccaacgtatttcgatctaatggaaaacattaagatcgcattagatgatgccaacatcaccatcccattcccgcaaatggatgttcatttgcataaagaagactaataagtcgaacttaaagtagtaaaggttattttttaatgaaattaaaagctttatcaattctagttgcagcctcagctgcaactagcgcattcgcagcagatgaaaccaaaacttgggatgtaaccagtgagttaggtgctattgtaacaagcggtaacactgaaacaaccacactaaaaggtggtatcaaggttttacataacctagaaaactggaataacgagtacaagttagacggtctctataaagaagatgagatcgaaaatgaccaaggtgttaaagaaacacaacgtactaacgaaaagtactcaatctcagcgcaaggtaactacaagttaaacgaaaagcactcacacttattcatctacggctcgcacgtatctgattactttggtgcataccgcaacgagtcagttatctcagcgggttatggtttacgtttaattgaccgttctgacatgtggcttaatgctgaagtcggtccgggttataagtatttccaatacccagacacaagcactgaagttgatgacaacggtaattcgcttgctggtgagcgcgaaggtgaagtaatcgcactaggtaaagttgattacaactggcaaatttcagacagtgcacgttttactcagttagtatcagttgaatacggtgataccaacaccaaaacacgttcagagtctgcaatccttgctaaaatcaacggctcactgcaaatgaaagtggcatataacatcacccacaactcagatgttgccgatgacaaagaaaacacagatacagaaacgtcattgacgcttgtgtatagtttctaatttttaagttaataataaatgggtaaacttgtttacccattttttttgcttataaaatgatgtagtatgccgcggctatctttattttcttagaagggaaactttgtgaagttttttagacttgtaatcgctctttttatctcgcttatattcataactgaggctcattcagtcactccaactaagcaacaaatagaacaatttaaaaagctacctaagtcgcaacaagaagcgctcgctaagaaatatggcctagatcttagtatgttggattcaacaggtcaaaacgcgaatcagttagaaaatgaaaatactgatactgttttgtctcgagggatgtttgacgataataaagataacaaagaaattacagaagaagataagtttaaacctgaagaagataagcttaaaccattcggttatgaacttttttctggtgaaccaaccacgtttgcaccgtcagaaagtgctctagtgcctgattcttatattgttggtccaggtgatactttctcagttagcttatttggtaaagaatcttctacagaagaagttgtaatagaccgtgaaggccgcttaacaattaataaacttaagccagtcacagttagtggtatgcaatacagtgatgtagttgaacttattaaagctaaagttaaacaagaggttattggtactgaagcttttgtatcaatgggcaaaacacgctcaatccgtattatggttttaggtgaggcatacaagcctggtgcttatactgttccttcattagcttcaattacccatgcgttattcgtgagtggtggtgtatcagagattggttctcttcgaaatatacaactaaagcgtgcaggaaagacagtaacaactctcgacttatataacctgttgataaaaggtgatagtagtaatgatgtcattttaaagccgggtgatgttgtgtttattccacctgttggtatgcaggtgagcgttaaaggtgaggtacgtaggcccgccatttttgagcttaaaaaagatgagtctagtcaagatttaatagctatggctggcggttttaatgccgctgcatatccgcagaaaacagttgtagagcgctatactggtaacagctcgagaacagttctgcaacttaacttatctaataaaaatgcgtataaaccaaatgatggtgatgtaattcgtgttccatcttctagccaagagcttgataacgctgtgaccctacttggtgctgttgctcatcctggcaattatgcttggcatgaaggaaaaaaagtgagccaactatttggttcacttaaaactgatttattgccaattgctgattatgactattctttaattgtccgagaaattaatcttcgtggggatatagaggtacatcaattttcacttctaaaagcgataagtggagaagaagacctagaattaaaacctcgagatattgtggttgtatttagccgcttccaatctttaaaaaatgaagaaaatgcgcttaccggtatggcgttgactcaagagcagttaaagcaacaagaaaaaattaagctttgggatgagtacgaagagcgcaaattctatgagtttattgatcttggtacagccttggataaagagcttgcagagtctttagttgaagaaactaagcaggaagtgctatcaataactgagctgttgactaacaaagaagagttgaaagaagatgaatacgcagtatttagccgtaaaaagctattaaagcctatcctttctaagttgaatcagcaagctacaaaagatggtggacttcaaattattggcgtgcgtggcgaagtattctatgaaggagtttatcctcgccctgtaaatgctaatgtgggtgatgcaattattgcggctggcggcttaaaagagtcagcgtatctccaaaatgccgaaattacgcgctataaagaaaattctgtacttgagcacatcggtgttgatttatccagcttaaaagataaaagctcgatcagtaaatatgagttaaagagcaaagacacgatcaatatttatccaattccgaattggcagcaagatcgaaaaatcaacattattggtgaggtaaagttccctggtgtgtacagtatagctaaaggtgaaacgctatctagtgttattgagcgtgcagggggcttcactgagttttcattccctgaaggtgctatttttactcgagaatctattcgtttacaacagcagcagcaattaaataaaatatctgaagacttgagaagagatattgcctctaagagttttaacagctcaataactgatgcttctttatcatatcaagatatgaatagcttacttacagatcttgctaaagttaaagccgttggtcgattagttattgacttaccttcgattgttaatggaaagcgccgtttagaagtagaagatagtgatgttttatatgttccttctaagcgtaatagtattaatgttgtcggtgaggttaatttctcaggctctcatctatttcaagatgagctatcacttgatgattatttaaatcgaagtggtggtcttaaacagcgcgctgatgaagagcgtatttatatcatcaaagcaagcggtttaattgaagttcctgatgcaggctcttggtttgcagttaacaatgacttccagctgtcaccaggcgacacaattgttgttccactcgatacggattacattgataatttgaccctatggagttctgcaacacaaattatgtatcaaatgggtgtagctgttgcagcaataagctcactgtaattagttagaatttgatgaaaacaacggtaatcaaattattaaaaaaggtaatagagcaacttcaagctgctcttttacctttgtgtagcaaatctgcaattctatctggactgtatttcactttcttctcacgagattttttctatgagcatcaagccatactgaaagcgcgtttagtgtataaaagacagcaaggcatgcatgggaaatcaagtgcattattgcgtagaaatatacatcgcttagagaaaggcttaattatgcagcctaggagaagtatttatgcacttgattatataagtgaaaccattgctgcttatcgtgttgcgctaagtaactctgaggtagaccaatcagaactgcagtgggcgtcagatgtaataacggagtacttttctgtagtagataaaaataaccctgttattaatgaaagctttttagcttttaaccagctatcaactttgtgttcaacctcgaaaaaaccatactcttaccatcaaaaagctcctcacaaagtagagtatgaggatttcttagccttaacaaagtttcgtacgtcggtacgctggtttcaatcaaaaagcgtagaaatagaaaaaataaagaaagcgatcgatgctgctttacaagctccaagcgcatgtaataggcagccttttcaattttattctatttcgagtcagccattacttaaaaagctagctaatctcccaggaggaacagctggatttgcagacaacattccacatttaattgcggttgtgggtgatttatcttattacccactttcacgcgaccgccatgtaatatatatcgacagttcgcttgcatcaatgcagtttatgttagcacttgaaactttagggttaagcagttgtcctattaactggcctgaattaattaatcaagataagactgtcgctagtttactcaacttaccacaatataagcgtgttgttatgttcattgctgtaggttacccatccaattcaggaatgataccttattctgataaaaagcaagctaaagacattctaaaacatgtttaagacatattaattcgttatatcgacagcttttttcccgcttgatatactcgaaaaagttaaatttaaggagttctcatgaaaaaaaataaaggtttcagtttaatggaactaatgatagttcttatcatacttgggctgttaggttctctagtcgctcctaaattattttcaaaggtaagttcatctaaagttaaaaccgcgattgctcaaatgcaaatgtttgaaacagcaattgatacataccgtctagacatggggactgtacctccatctcttcaagcattacgaaaaagtgactcagcaaattgggatggaccatatttgccaaaagacattcctctagacccatggggtaaagagtacatctataaggtgcctggtgaaaatggctctccttacagcattatgagttatggacttgacggccaacctggtggtgaaggtgaaaacgaggatgtagttcataaatgatggagctaagccaattacttgctgaacaatttaaaatatctgcggctgacatagataaagctaagtcatatcaaagtcgctatgatggcaggctagaacaaattttagttaatatgggctgcttgacagaagaggacttagcaccactttacagcaagttattaggctaccctctttttaatgctgaagattatccaaattggcaactacctgaagacatcaatgtcgaaatacttcgagcgttaaaagagcttgattgtgttttactcgaggccaatgaggtatggactattgcatgtaaagatccattatctttgtcacttgcacaatttatacagcaacagaatgttgatgttattattttggttgcaacagaagctcagcttcaaactttcttttatgaaattcaaagttcatcagagaatagtgttgaagaagatgagttaacaggtgacgaggaggcaagattaagagagttagcttcagaagctcctacggttaaccttttaaactcactgataactaaagcattagctagaggtgcttctgatatgcatcttgagccgcatcaagggcgctttcgcgttagatatcgaattgatggggtcttacatgaggttgataagttagctccaaaaatgcagcttcctatcacaactcgacttaaaatactttctggaatggacattgctgaaaagcgccgacctcaggatggaaaaatagaactacgcatagccaatcaagagcttgatattcgtgtttctgctttgccattgaacgatggtgaaagtattgttttgcgtttcctgcttaaagactcgattcgttatgatatgtctgttcttgggctttccaatgatacacaaagtctaattcagcaagacttacgtaaaacaacaggtgtaatcttgttaactgggcctacaggctcaggtaaaacaacaacactttatacattcttgaatgagcttaatcgtccagacgtaaaaatcattacattagaagacccagttgaatatcagttagagggggttaaccaagtacaagttaataacgatatcggttttaactttgccgcaggtttgcgctctatagtacgacaagatccagatattatcatggtgggtgagatacgtgatgcagaaacagcacgtatcgctttgcagtcggcactaactgggcatttagtattcagtactgtgcatacaaatgatgccgcaagtgcttatacgcgtttacttgacttgggtgtcgaagaatttttactaaatgcggctttagtttctgttgtcgcgcaacgtttggctagacgtttatgccaacactgtgctgagcccttagaagatactagcgaattgctttctcagtatccattagagcaggtagctaaaaacgcagcaattagtgaattaaatattaaacaggctgtaggctgtgagcattgcaatcatactgggttcaaaggccgaatcgctataaatgaatatcttcgttgtgatgatgaaattaagcaattacctaaaaacgatcaatttatatctcgtgcgcaagcccataatgcacagctaaagcgacgtaatttaatgcaagatggtttgtataaagtaattactggcgtaaccaccattgatgaagttctacgagtagctggctaatggagtttgaatataaagcgattgataatcaaggcacgcgtcatcaaggtgttgttagtgcaactaaccaagcagatgcacaaaaaaagctcttaacagaagggctcaatgcattatcgattaagcccattgataatacaaaaagtattagcagtctgttctcgcaaaaagtaacccttgatcaactcgagttttttacgagtgagctagctctacttttagaaagtggaattcgcgtagatcgcggaattgatattattaaaaaagcaaatggtcatcctgcgttgacacgtttgttaagccaaatttctgcatctttaaaaaaaggtgcttcgttaagcgaagcgttctcacagcatgagcagctgtttggtcctttgtatattagcctacttaaaataggtgaaacgtcaggaaatctaccagaagttttacagcgcttatcaaacgacttaaagtttcaaaaagatttgcgttctcaaataagcaccgcattaacttatcctagcgttatattctttgtttgtatcatggcggtttattttgtgcttacattcattgtccccaaaatgtcaggtatttttactgaccttagccaagctccctggtacacacaaatgattattaatgtcagtaatttttttgtggattatcaagtgattattatcagtgggattgttgcggcaattacaggtttgacatatggcttaaagcaacctgaagtgaaaaactggttttatgtcaaagtatcgcatttaccaggtatcggaagtgtaattttaacggctgagcgtatccgtttttcccaatcaatggcaatgatgttagaagctggtttacagctagatacaacactggagttgacagccaacactttaaaacatccagaattaaaacgagatgccaaactagcacttaagcagctaaaaaccggtaaacagttgagtcatgtgttagaaaaaacacgcatatttccagacttttttctatcgataatcaaagttggcgaagaaacagggcgtttaccaagagttttttcagaagttgctcagcgtagtaaatctgaattggaaggaattattaaaaagctgaccactatgctagaacctataatgcttatttttatgggtggttttgttggtggtatcgtaatcactatgttgatgagtatggtatcaattaatgatgtccccttttaaaatcaaaggattctcactcattgagctaatggtcgttatggcaataatggctgttttaatggggttgacgggcggtgttattgttaagaatgttgctcaacagactcgtttagttgagcttgaaaaaacccaaaattacttcaaaatgctgagttataaggcatattatggcggctatcctataaaggttgatcttgatggcagcatgttcaaaatcagtattgccgatcaagtcacgaaccttgaatttgaagaacttgagtttgaaaagtcaagttataccataaacacaaaatcagccattatgccgaactccttcactgtaaagtggaatgaaactagtcgtgaatttccaataaatacaatgttcaagccttatgaataaaaataaagggtttacgctgcttgaagtattaatcgcggcgattattttgtttacagcattagctttagcgagtgaaatttttaaaagtgctacattatcaactgatattgcagttaaaaatgccaagtacttccaaatcaccccttcagctatcactgctataaaattcgatctgcgaagtaaagtaaaaaatcgcgacataccagaagcagatggtgaattggagttatttggtatttattactcttggcaagcaaatcgagaaacttttaatagcccgccgacagatgagttatctgatttttcagagcgaaaccgtttctcaatttacaatgtagatatacttgctaaaagtgcaggccgagaaagagagttctcttttaaggttgcaacatggtgagaatacaaagtaaacaaactggctttacattaatcgagcttttgttagctacaagtgtattgatgctagtgttatatgcaggatattttggctatggtttgtacactcaaaaatggcagacaagaaccaactacttttggcagcaaagccaacaagcacttgcattcgatgcaattactcgagtctttgaatcagcaagcacatacgttgttgaatcggataaaaacgagcctgcacaatatttttcaggtgacaaagaaagagtcatatttataagcacttcacctttatttaaccatgaagcttctgtcgtagaatttaagatactacaaaatgatggagtttattcactcgtatataatgaggcttcaatgagaaataacttactgttgaaacaatctgatgttattgagtgggaacatcaagttacgttgcttgagaacttaaaaagaatctcttttgtttattatgggtggtctggcttagatgaggtttctagaaactacaaagaagataatgtaaatagtcaaactaagccacagctttatgccaaacatgttatggaagatattcgtatattaccaattagcttaacactcgaaatagaagggcatgagggagagcgaagtcattttcctgtagctctaccagaagaagctttctctgttctgatcgattacttaaggttagaaatataatgcagttccaaagaggtattgctctggtgcaggtactgataattactcttgtcctaagtacccttgggttatatataataaaatcctcgagagaacaggtcgccacaacgttcgaaattaaggaagcgttgtctttgcgtataaaaattgaaaataccgaggctcgagttattaatgagctattaagtcagtttcggattcaaaacgtaacaaatgaatctgacatcgccaaaaactggaatttttataataaaccttttgaagtagagggggtttcagtccaacttcaagacttaaacggcttaattagcttgaatgttgcagatttacaactacttaaagatgttctgatgaagttaaatgtttcgccatctgagagtgatatatttattgattcgctagctgattggaaagatgaaaatgaccttaaaagattgaatggagctgaaagggcatattatgaatcgcaagatatgccaggtcctaggaatggttacttgcaatcattggctgaagttagtcacattagaaatagcgatatattaacccctcagcaatggagtgagtattttaccgttgaacatatcacaggctttaacccggcaaacgctccggagccaattttgcaggcatttattaaaaatgatacaacggtagctaatttagttggactgcgcgataatgcaggattaaatggtaataccttttacagggaatcaggcattgagcctgacgagtttattaactttctccctggcgatagtgtaaaagttactctaacagcaaaaaaatctaatcaacgagtgtcaaaaagctttacggcgaaaataagaacgcgttctttaactcgccctattgttattactaatgttatctggaatcaaaatgaagttgagtgagttacttcaaaacgttaaaaataaaaaatggttgctcaatagcattgcttactaccacgaaaatttatttttactggcagcaagtgaattcaaggtaactgacaaaagtaaaaaagtaatcatagtctctcgccgtaattataacgaaaaatggcagacttacccttcagtaagcttaaaagagttgaaagacattttaaagcttcaaaaagagacttcgaatagccttataattgaaagcttttctaaaaatgaacagcaagagggctacgatgtaaagactattactttttcagaaaagcttaccgatgagttttctaagcatatactcatccccgagactgaattaattaatcactactataaagatcaaaaggttgttatcgaagcacagacacctgccggtaatctattttatagtaaagtggaaggtaaaacgaaaagtgcatacaaacaaggtttagtatcatcattagaatcgttctgcttaagtattggcgtacatagtgatgtagctaaggtatcgcttacacaggacgattatgcatctttgttaaatgaagctattttgaatacacctttcttaagcctttataaaactgctgcttttgattttaaatcgagcgtagattacaagctcttacatagtctttattatgggccgttaatttctgcagggatattcattgcaggagtaaatgccttttatatgtataaagctaactctctagaaacaatactattaagctatcaaggcggggtctctgagcttctggagcaaaagcaaaaaattgatctagataaactatatgttgaacaggtattacaagagtttgaactctaccctaatgttcatagccattgggatattgcatataaagcgatttcagaaggaatggacatacaggagttttctggttctaaatcgaatgttacactcaggggttttgcagattcagcttcaagtattcttgcggtcataagtgagttgccaatggttgaaagtgcccaatttagtggtcccgtcaggaaatcaggcaagagggattactttatcatggagctaaaggtagtgggtgaaaatgaaaagtaaccttttaaaatataaaaattatctttttgtcttgtcggctttgattgttgcaaattttgtattggatcctatgtggaaaaatattgaaacgttgcagcaaaaagtttatttggatgaatccaaagtagttaaggttgaaaatttaatagctaataaaaagcaaatagaaaaacaaagtggtttattatctattaataagttgaagttacagccgtatctatttactgcaagtacagagtccgagttcaaattaacagctcaaggaaaaatagaaaaactgttgcaaaccaataattgcaatgttgagcgaataggttgggcgggtaaaagtaatattgaacaacaattagtacgctggacattagaagccagatttagaggtaatccggaatgcgtattgaatgtatctagacaattagaaagtttagagccaatggttaaaattgctgattattcctatgcaggtaaagaagtatcaggtgataaacaaaattatatggttgtcgctcttactttgataatgtggcaaaacgctaatgaggttgcattatgaagtggctcatagcgtttttatctgctttaacagttgttgttcttttaaattcattagatatgcctgaggatgtggcttctgggaaaggtaatgaactaaaagaagttggtaaaattaatttacgtaataaacaacctgaattagaagtagaaaaacagtggttaaaaaaagaaattgaaaaacctaaagtagaagaaaaggtaagtgcaccacaggagaaaaaaacagcatttcctgttttagaaatagaagggcagaagtaccaactactgggtatatttaagcaaaaaatgaaaccttttgtgttattgaaaaatactgaaaataacttggttaaattacaagttggagatgagcttactaaaggtattttcttagaggaagttaccgcatcagcgataatcatcaaaaaaggtagcgacacaattaaatttaaactttttgaacgtagtgacaatggctaataaactttacaatttaaccctttcaacctgtttggtgttaggggcgacaagctgtgcatcgcttgtagatccaaattcaagtgttgaaacagaaaaagtaactgtttcagaatcttaccttgatttaccgcagggtgaacaacgtgaagaggctgttgaattagagcaagcagagcaggtaaacggtaaaactgagcgattgaatcgactatcggattcaagacaggcaacaacattagaaatcgatttatcaaagtctttttctcaaaaccctcagtttcaagtgtctgtgaatgcattgccacttaatgactttattcattatgtattcggagaattgcttgatacatcctatattttagaagcgagtgtaaaaagcaacactacgcctgtaactttagatttaaaagaacagttaagcgctaaaaaattatttttactagttcagcaaattttgtcacagaacaatgtcagtattgttaaaaatgacgggattttttatttacatactaacaacgcaaatactagaacagataaggcatttgggtttggtcgtaatgaagaagcggtaccaaatgtatcaggtcaaatagttcaacttgtaccaattcagtatggtatgcaacctggtctgcgtaatattatgagccaacttgtcgataccaataatacctatgatgcgtcgcaagcattattaacgattgaaggcaaaagagaacaagtactcagagcgctttcgttagtatctctgttagatagccctgcaatttataataaagcaacagctcttattggatttgattatttgagctcggaaactttcatcaaaaaagttaccgaaatactcaaagaagaaggaattacagttgccgatggtggcccatatgcagcgagtgtgaagtttgttcctttagagcacttgggtaaagtggtggtttttgctagcagtgatgaaattattgaccgcgtagcgttttggcgcaaagagcttgataaacctgctgctggtgctgaacaaagcttttacatctatcatcctaaatatgcgcgcgcctcggatttaggggcaagtttagctcctcttgttggtggtagcctttctggtggaagtaatcgttcaaaacaaactacaaatgaacgaacttcttcagcgagtacgcgcaatactgattctcaatcacaaagtggtaatgaagtacagacagttgaaggcgacaacatgcgcctagtggttgatgagagagcaaatgcactgattttttactctacaggtcaatattaccaagagctgcaacctattattagacagcttgatatcatgcctaaacaggtcatgatggaagtcgttattgctgaagttaaattaacgggtagcttctctaaaggggttcagtatgcaattcaaaatggaccatctacaggacgtaatgaaaatattagtttcaatactgaaggaaaaggcgggtttagctactcagtagttgggcttccgggtaatataagtcttaacttgtctcaaacagatggattagtaaatgtattgtctcgccctacattattggtgcgtgatggcgtttcagccaatatcaatgtaggtgacgatatacctaccattggaagtaccactgatgatccactggatggaactggaagacaaacaactacaattgagtatcgccaaacaggtgttaatttaacagtaacgccgactattaatgcccaaggtactgttataatgactattgatcagagtatttcaaatatttctgatacagatggctcaagcagcaccccagcattttttgagcgtacattaaaaacggaagtagtagccggtaatgggcagacagtgatgctaggtggtttgatcagcgaaactaaatctaacggggcttcatctgtgccattttttggtactattccagtgttagggcacctatttagaacggatagtagctcagctgataaaacagaattagtgattttagttacgccaaaaatagtacaaaacaccgaagactggcagcgtgttaaagaaagctttattaaaggtctagaaaatcttaagttttaatgttttttttaacaaataattacttgaaaaatgaccagttaaacgataatttagctatgttcagtgaaagttaacttacgtattcaaaaaagcggtaataaaactataactgtacgtgctttaacgggtttacttaaaacttcttaagtaacttttgtcataaaaatgttggtattgcatgttacgatactcagaagcttaaaaactgagtcatcagcatgcaaacgaacaaattaaattaagagggttggctaataataaatgcctattttagtttctatattgtactaaaatgtgtgaaaatactttacttgttcataaagtgtgcatgtaaggttaattacttgacaagtttattgttaacccttaaatttagcttgatctggcaaaactccagccagaacaataaaaaatcttggtgtattgccttcattaacaatacatcagtttcatgaaactaggagaatggaaataatgaaactattcaaaaaagcgcttttagctactgctgtagtaggtgcaatgggtgcacaagcggcaactatctcaagtgacgctaaaaaattatctgcagaaggtgttgcattaaaagtagcagcaactgctgatactctaactttcgacatcgttgttgataaagaccacccgtcttcgtcagtaatcactttaaacttcgattcaaacgttgatctttcaagcacagctggtgttatcactggtggcgctgtaactcaaggtgttgcatcaggtacagcttatgctggcgatgtaggttttgactacggtactggtagcttcacatttgacgacgttaaagttacaaatggcgacgcaactaaaggcgaaacagattcaatctctttcaaagtaaaccttggtaacccacttacagctaactcagcgttccgcgttgttttaggtaaccacaactacggtggtactaacggtgttgctaaagttctagttaaaggtgcttctactcttagctacgtttctaacaaagctgacaaatcagttatcgaaactggtactggtgtgattgcttctgaagtaactcagtttggtttcaaagttgatactcaacttgacggcctaattatgcgtgacgacctaacaagcttcgtaggtacaaacggttctgcagttaaaactgatgctcttaagtacactttcacaaatgatgagtctctaggtctagctcttcaaaacgttaacgcgaaaattaacttcgctggtaacttcaaaggtgtaactactactgtttctggtactactttaggtgctgcttctactgctgcagcaggtaacacagctggtacagcaggtactctatctctacctactgctactggtggtactacacctatcgctgttttagattcatatgtaatgactactccagcaactccagttaaagcaacttacgttaacactgttgatttcacaaacggttctacaagcactgttcaaatcccagtaactggtgacgttgaagcttctgttacagtaactagcgcttctaacgcaactgttggtactgacggttactctttatactctaaagtagctgctggtgagtgggctgttgacgcaactatcatcaacgttccttacgttccagtaaatgctcctaacactgatactttcatccacttcgctaacgaaacggataaagaagtagatgttatcgttactgctatcgataacaacggtaaagagtacggcccaatgaaccttggtgctaaactagctgctaacactgtaactaagatctctgagccagcaatggatactctattcggtcttaaaggtgctactactaaactaagcgttactttcaacatcgacgctgataaaggcgacgtaaacgcttacgcagttagccaaaacgacaaaggtcgtacagaagtttctacttcacaacaacgtggtaactaatattagttagtttaactactttgtaaaagcccggcttaagccgggcttttttatgcttaaaaacttattgctactaacttttataggcctgaaaagtatttacaagaatacagggaacaaaagtacataaatttatgtcaacataaagtgcttaaattatcatagaagtaaattgagcattgcagcgccaggcgaaggtatctaaaatagctttcaactgttattacagttcagaaaaagttgttgtcttaagtaatttaattaaaggtaaagcatgaaatttaaaacagtatttttagcatcaagcttattctttgcagggatcaattcaagctttttacaagcatcaacaccattacttcaggcacagcaaggaagtgaagcttgtgatttcgatattaagttttcatcagagccaaaagaaaaacagcaaaccttaaacatcggtaatggcgttgatttaaatttaaaacagtttatttctataaaacaaatcaaagctgcgaacattgcaagtaatgtaacttgtcagcaactcgtaggtcaaaagtacacaggttcaaaagaagaatggcaaggctttgtgaaaaatgccttacaaggcttaattaactcaggctttaaagacttacaatttactcgtgtgggtcaggatgatgctgtctacgaaggtgaccttgaaaatatggaatatagcttcactggagctataaataagaataaacaaattatccataacttagcggtgttagataaaagtaacaatcaggttgttattatttcagtgagtggaaatgaaagagtggcggatgaaattaaagaagagtacaccaatttagttaaatcattcagcttataaagtgaatctttttataggtagacgtgataaagctaagcgtctaccttaattttatacctaacctaactgtagatctcttttgctcgtaagtaattctctgtttcaaagcgacatagatgtttaattctttgttcaatatgtggctcatttaaataattttgaagagtgctttttactatttgtttattgctttctaaatgactttcagtggtgttgtggttaccaatatgtattactttacctgtaagcgatttaactccttggctaaatttatctagctcatcaagaaaaccgaccaaattatagcttgccaggtttgcaataaattcagcttgaatagctttcgcatctgcttcatctgcagcaaatcggcctgttacacacatgctcgttacattagccatttgccacccgcgtcggtgagataatatagcatctacttcttgagtaaggttatcagtagaaaggttgttaggcgacatgataggtaaagagttagtcaatttattataaacatagttagatttaaaacggcttacaggttcacgtaatacggtaagaaaatgatattgttttgcaaactgatccaacaattgtttgttggtggttacatgcccacttatgtattgccagttctgcgctaggtggtaagcaagtaaaccagataattgcttcgcatggtggtcgctaaattcactaatactatctagatcgttaatttcacggctcatgcctgctaggctcatcgcaatagcaccctcgcggctaaatcttggttggccagctacagcaaactgttctcgaagggctaaatcaatcgatataccacctgacttaggaatatgtataaagcaaattgactttgactgagtatcggtactttttgcaatgcgtctcaaagtaaggtcataaccaaattggttaattagtttttttatagtgcttttcataatgtacttttaaattttgggctaactttattaagataaagggtgaatttagcatcgattggtgaagtattttggcataactgcgggttttgttatttataaacaaaaagccatagcttgctatcatataagagataagtgttgcccaagcagcacctattccatggtattttggaattaaaaccaaattgagtaacacattaattacagcgccagcaacatttgacaccaaactatatttataaagtttttctataatgagccatttggaaagaacagccctctgaaaaataaagacgctagcaaatatatggatactcagaatagctgcactagcacgatatgattcgccataaattagtgttatcaattgtttggaaaagaaccaaagaaaaatgctcagtgttagtgctattaatgtaagtacaacaatcaattgttgtagagtgacttcgtaggcatggtaagccttaaatctcgtgtgacttaactgagctgtatatacgtttgcaattaatacagggaaaacataccaaaactccgatagtttagcggccgcagcataataagcgacagtttctgtgttaaccaactgcgcgagcattatttgatcgacttttaaataaagtgcagcagcaattccagaaaatagaagccattgaccttttttgtacagagcgaggtgagaacttaaccttgcttttcgttttatttctttgtggtgcccttgagaaatataaataaagtaatagcaacagccaataaaaacactttctaaaccttgaagaagaactaagccttgcaggctggcagagttaagtatagcgacaagtttcgcgacattgatgaaagtaattatgattaagcggactcggacaagtgtagtaacttgtttttttgcaatataaaaaaattctagtacgtataaaaaagtaaaaccttgcatagcaacaagaaggataatgagctttgattgctcattagcgatatctaaaaagtgcaggcaaatgagagtagtcactaaaacagaaaagcaagcgccgagtaaacgtatacgcaatgctgattttatgtagtaatgactatttttggggtgcttcaccacatacttagtaacaacattatttaaacccataatacaaagagggctaaaaagaccagcaaatgaaataatatacgaaaagtcgccaaaaaaagtaggtcctgctatacgggctagcagtacactattaaaaaagctgagtcctagtaaaactaccttttctaagatcaaaaatagcgaatttttaacgtttgaactcatcacacgctttcatcgttaagttaaacgcgtatcttatcgtaaaatatagaaattgcacagaacgcttgaatgcatattcattgatgtatatgctaactgacttttcttttatatggctggaaaccaatagtgttgatagagattaaaggtgttcaatttgtcaataaaggggcagaattaatgcttgcctcaattatttctcagcttgcaaaagaattgcctagtgctgatatttgcctagcacataataaaaattcgccttataaagatcgagctagagttggcgcttatcaaaagattaacttaagaaaaaatatcattgatctaaatggtgttttttatttttttcctcgttttattcttaattattttaaaaaccgttttggtattgtgacagaagcggatgttgatgttgtattagatgcatcaggatttagttatggtgaccaatggtctgatgtaattattaagcaagtcgcaaatgaagtatcgagatttaaaaagaagcgtaaacattacatattcatgccgcaatcattagggccctttacacgaaagagtaataggcttagcgcaaaaaaagctttcaaaaatgccagcttggtatttgctagggaggagccttcttataagcatgtaaacagtattaccccgcaacttaactctctaaaaaaagcgcccgactttaccaatgtcttgttagcaaaaaatatatctgagtatgcaaagtatcaggggtacttaatagtaatacctaactcaaaaatgctaagtacaaaaaataataacaaatggtggtatgagaattacattcctacaatagtgaaacttataaataaagcagcagataataaaattagtgctatgatacttaatcatagtggggttgatgatttagcgctgtgcgagtctattcaggctcagttaaaccagcaatgcgatatagttaacccacagagtgcgatagaagtaaaagctattattgctaatgcaaggtctgtatttagctcaaggtttcatggttgtgttagtgcactttctcaaggagtgccttgtattgctactggttggagtcataagtacacagaactttttgatgaatacgatgtagggaaatatctgttacctcctgaagtggcagaagagtcacttattcaaacattagacagcgttatcaacgaagaagaggctttaaggaccggtttactttctaagtctaaacatttcaaaaagctaacaggcagcatgtggcaagatatatttgatgtaatcaaatgtaaggaagatgggtgaaaatgttactaaattgttgtttgttttttttgttgtttaatatcagtgatttagtcttttgtggctcggcactataattcttttttaatttttatttttgtgtaaaccgcgtataatcagcacgttttggatcgtcgttgggcgtattaagtttatttatgtttaataaggctattttttgtgatacttgatatcttaggactatttttgtgttcattcatgagccttttcgttttcagaaagtttgcaatttacataaacttagttgaccagccgaatgaaagaaaacatcatactggtgcagttccattagttggtggacttgctattttcattgttgtattcagttatttaattgttttttctgaaacaatctcttcatcagctttatacctattctgtgctggaacattgttaattgttggtgttcttgatgatttgttcgatattagctttcgggttcgacttgtaattcaagtcgtaatttcatgcctgatgatgtttgtgggcgagctaaccttgaataatgcaggacagttaataggtccatttgatttagaattttcttatttttgctatcttttcacagttgttgcggttgttggggcaataaatgcttttaatatggtagatggcattgacgggcttttgggggcgttggcaacagttactttcacatccttggcaatcctattttatttgaataatcaaaagtctctggctgtttttagcacagtgattgtcgttacaacaattccttatatcttaatgaatcttggtttccctttggggcaacgcttcaaagtttttatgggtgacgcaggcagtaccgttattggttttactgttatttggcttttattggaaggttctcagccagaacaaaattcagcttttagtgctgtaacagcattgtggcttgctgctgtgccaattattgatgcagtatctactatcgcaaggcgggttcgaaaagggcagtcaccatttcaacctgaccgtgaacacttgcaccacatattgctaaggttggggttttcgagtcgacaggcgctgttagtgatatgtactgcttctgctttattagctgcggttggtattattgcacatatataccaagtacctgactacataatgttttatttattcatagccttaacgttggcatattatttttgtatgttgagaatatggcgtatcagtgttcatgttagaaaatttataaaaaaattaaatagcaaatagcgtggccttcactacattaataacctttgaactaaatggaagtaaattttgagctctgtaaaacacgaaacgaatcaaaacgatgaaattaagctttctcacctttttgagatcttgtggaactacaaaatctttatcgttttgttcaccctgatatgttctgtggccactgtcttttatgccataaataagcctaatgtttacactgctcgaggaatttatatgcctaaatctgatgacggtgcgggcggtctagcaaagttggcaggtcaatttggtggtttagcaagtttagctggggttaatcttggtggcggtggagaaagcaaaacggatgttgcgatagagctattatcctcgcgttactttttacagtcttttattgaaaagcatgacttaatagtgcctttattagcggtaactaagtgggatgaacagtcagacaagctcatttatgatcatgatctctatgacccagagcaaaaaaagtgggttagagaagccccccctggaaaaaacgtaattcctacctcatgggaagcatacgaatatcttaaaaaaagtatcaatgtagaatatgagtcaaaaaagggattagtgaaaatttctttagtttattactctcctgaacttgccgctaaatggttagaccttttagtaaaagatatgaacgagttttggaagcaaaagaagctagatgaaactaagcgtcatatagatttactaacaagtaaagctgataaaacacaagttgcagagattaaagaagttttctttactctaattgcagaacaaacgaaatctaacttgttagctcaagcaactgacgagtctatgttcgagactgttgcagaagtgattgttccagaagagaaatctgcaccaagtcgcgcactattatgcatcataggtttcattttcagtggtttttttgcatgtgttgtttctctttttatgggtatatcgaaaaagcgccaacagctaaacggctagaaaaatgagagacataacactcggaagttatcgtaatttttggtcgcaagtggccgttgcgatgatgtcactttatattttagctgacatgttttcgggctttactattatataccttggtatagatattaaagcctctctaatctataaagttcctctgctagtattaattttgggcctgattgctcgcagtgatgccaatatatttaacatgttattactgtttatagtgatatcttttattggtccattttttgagtttatggagcacgcccgttctgatttttttatatctgacttttcaacagcaataaaaatcttaacacctatttgtatcttctttttatttaaagagtggtacaaaaaagacccagagtttgcacttgcaagcacacataaaattttaacttactgctttgtactgcttagtattaactttatgctcggtgtcataggctttggtaaaagtacctatgattttggtaatggaacaacagctggcaccactggtttcataatggctggtaatgaattaggtggagcttttcttgttgcctatacttatatgcttcataaagtttggaattataaaagtaagtgggcttacttagcattagctggttttacggttttttgtggtgtatctgtttctaccaaaaccacaattcttgcatcgataattattatatttcttgtgcctatcgtaaatgaaagacaaaaactatatcagttaacactgctaaaatttaagatttttactccaattattgtgttagcaataatagtgataattttaattattgatttacttcaatctctaggtttgtatgaccgctttatctggctttataacaagggcggtctattaggcatgattttatcgggtcgagaagttatggtagctaaaaatgtagaaatacttttgcaaagtagcactttgttcgagcaactgtttgggcagggagaagccctatcgttaaagcgggctgatagctcagctacaacagaagttgatggcgttgatatttttatattttttggtgttttcacttttctcattgtttttagcttctatgtttacaccttatacaaagcacatcaacaaaccttagctggttataacttttttgccccatttgtattattagcaagctttatattgttaattctttcgcagctaagtggtcatatttgggggtcaggaacggtagggattttaatgggagtcatgcttggctctattaataacactgaaaagcaaaagttatgaaaccaggtttctaattttattttcgcaaggtgttataattcaattttgctatcacaaccattagtgtaaaagtgatggatatgattatttttgaagtaagtaacgttactttaattagatataaataagtttaggattaaaaaatgaatctagttgttctgactgggcgttatccatcaatagatagcccttacagccatatgtttgtacatactcgctcaaaacaatatattgctcaaggacacactgtgacagcacttgtaccaagtgaaaaagaagaacaatacacgatagacggtgtaaatgtaattctcggccctgtgcacaagttaataaaatatcttgcgaatgttgaccgtgtcatgattcatttattattacatcgctttacaaaagcaattgatgcaagtgtgctttatcgatacgtgcttgatcataagctacctactttgttcttcatacatggtgttgaagtacaaacaatctggaatgatagacgtgatgatatatcttggttagctcctaagagtgtagctcgctggctttatcgtgattgctatttgatcaaaaagatgcaaaaaaccttagcagaatttgttgagtcagatatacctgcaaaattcataacgccttcagattggatgttgcaagaagcaataaacaataccggcgtagacctacgccaaaagtcattggttatagctaatggtattgatactgaaaacttcaagtttactgagcgttgggctgatagagaaaagcttctaagtattagacctctaaattaccgaggaaaatatgccgttgatttagtgctagaaacagcacgtcgtatgcctggaaatattcaaactgcactttacggcaaaggcccagatgaggataaaattaagtcggtaatttcagagcaaaatttatcagacagacttacattaaactctcgctttttacaacctgtagaaattccatctgttcatcaacatgctggtatatatttaggtgttactagaatggatgcccaaggggtatctatgtgtgaagctatgtcttcaggattacctacagtatctttctctacttgtgctattcctgaatttatagagcacaataaaaccggcttactagctaaaccatacgatatggatgaatattgttctctagttaatgaacttatagaaaatagagagctatttgaaaaaatcgcatggaatgctcaccagtcaatggttgcaatagatattcgcaaaacctcagaacaagagcttagcgctaagctagattaatatcatgtctttagatttttcaatttgtacacctgtatataacagagctcatttattacctaggttatatgagagcctaaaattaagctgttcagagggtatttcgtttgaatggctcattgtcgatgacggtagcactgatgacattcatagcttcataaaagaagttgagtctgaggggcttttaaattatcgatatatcagaaaagaaaaccagggtaagcattcatgtatgaatgtgttttttaaagaagccaaaggtgaacttacattaattcttgactctgatgacttgttggctcctaacgcgcttaaagaagctaataaaatatggaaacagatcagtaaacaagagaagtttgcaggtatcataggtttgtgtattgatttagcaacgcaaaagcctagcgcgcaagagtttcctaaagaccctatggaatcaacgatcttagaaaatgcatataaatataatatgaaaggggatcgttgcgattttatcagaacatctttattgaagggcaaagcattccctgtatacagtgacgaaaggtttatgcctgaagctgttgtgatgactctctttgatgcagataaaaagtattattgcacaaattcagcttttaaaattattgagtatcaagcagatggcttaacaaatagctatgataagctagcgatgagaaatcctaaaggcatgtgtttacggtttcagctaatcctcgaaaatatcaacttaataaagctgccatcgggcaagaataagctaaagttttacggtaattatatgcgttatttatgccaccgcgacggggtagtaaaagcgttagttgaatactgtaagatacccaagtttttcttgttgaattggtttataggtgcgcctgtcggaagcgttatgtacgtgaaagataaattaatgaagggcagttaatggcactgttttgggggtacttctctcgcttttctagcctagcgagtagcttaattattatgccatttgctttagcaaattttactgaagcagagttttctctttggatgatttttgttgccttctatgggctaattgttgtttttgactttggcttaagtagtaccttttcacgccaaatgaactatgtgctatgtggtgcgcaaacactagaaaagcaaggcgttagcggtgagtttgacaagtcaaatatcaactatgctcttttctctacggttattgacagcgcaaagttcatctttttaattattgctgtattaaccacactcatattagcgattgcgtatttcttctatctagaaaccgtggcatctaactcaggtttaaatattcaatatgagtggttactttatagtgctgcggttgttattaatatattttgccttttgtacaatgcacttttttttggaactaacaacgttgccagcatttataaagtaacaagctacaataatattgcattttttattgtggccatttcgatgattttaaatggttacaccttaatagcaattgcagtagcaagggttgtatccgcatttgtttactttgtagcttctaagtatgaaatcaataaatataagatgctgcaagggtaccaatcagttaactttgataaagtaaaaccaacactgtttaaaattttacctaatgctagccgtataggcatagtatcgttaggtaactttatgcttactaaaatatcaatattaattattgcttactatttcagtgcatcagactcggcaacatattcattggcattaaacctattcaccatattaagtgccgtaagtttattgtatatgaccgttgttacgccttctttaaaccgtgctatgcaagagaagagctatcaaacagttaaacgcttacagggtcgtgtaaggctagtatcaatgttaatggttttgttggggtgtataggcattagtattattggaccatttttactaaagttgattggttcagaaacaagtttaccagagctaccatcattactattttttagtttaatgatcttattagatgttaatagacagatttcaatgaactttattgcggctaataaccatgtgccattctcaaaagctatcgtgctttcggggtgtatcactttattagcaaccattgcactgtttgaactagggtatcagcacttcatattaccaataattattcaaataattgttcagtcagcttttaataattggtattggactgttgtagaaaagcgcactctaaaggaaatggctgtaaatgcagcataatggcataggttttaatcgtttgtgaaagcttaaagtaactttaagctctcacaaatttgctttgcttttgtaaactcgcattttttatatggagtaggtgtaaaagttttagcttgtttaattttatctatcacttcacaggggttataacagccaaggccatagccgttagtgtcaacaaagcggactaaatcttgctgatgaggatcaaggcgttcagtgttttgaactacaattatttttttacccatttccagtaagttataaacgcttcctgcaccagcatgagtaattactaagtcagcttgttcataatatttatgaatatcactgacaaactcgatcgttgtcactgatgggtttttatattcgccatcagcaatttgaaaaatagcatcatcttcatcagtcaacgctttttctatttcaaaaaatagcgagtcgtagcgggtactaccgacggttgcaaatattttcataaacggcctgaataaattgcgttagggtaaagcgcgagtaagtcttcgttttgtacaaagaaagtatcggcaatgcgatacatcacttttccagttaaagaacggctgtaaaagcgcgaccacgactctaaaaagatgacttttttacctaatagcttaaatattaaagcgggcaaaataaccattcctggccctgtagaaacaagcccagttaccttgtaattacgagtgatttgtatgcattgctttgatgttgtaaaagcattctttagcaactgaaatggggctttccacttgctaaatttatctctaggctcattacactcaaagtgttttagagaattaaaattatcttttgtatcagatattgatacaaaatcgaattcagcatgcgttttcattaaggccaaaagccttttcatttgttctttgtgaccaccacttccataaatgatgagcgttacaggttttttttccaaaaaagtcaccgttgtaatttaattggggcgattataataaaggcctgccagtatttctattatttataaaaagtagctacttcagaatgtagtcaatgatgactttggttagtcttgtaggatcatagttttctatgacctcttttttaccggcagaatcaaattgctcaatattgtttgccatagtttgaatcgccgagcacaaatgttctttgttgtgagtatcgatagtgattccaacatggggtttaacaatatcggcaacaggaccgttattaaaagcaacaataggtaagcccaaactcatcgcttcaataaatacaacaccaaaagaatcatagatagaaggcaaacaaaaaatatcagcgctctgtaaagccttagttttatttgagtcagccagccaacctaaaaactcaacacggtcagcaacccctaagttttcagacagagaaacaagttggttcttaagtggtccatcgccaatcacctttagttttacattaggtaaatctggcagtgttttaataactaaatcaagccctttcccttctatgaaacgagccattgatacaagagttacattgtttttatcaaatcgcttttgaggagccggttcgtgtgcatgttcaaaaagcttataagctaaagggttagcaacaacaagagtgtcttttacaagccctttttcttctaatagagttttccaccaaggagtaacaactactactttattggcaggtaaaagaaaaaccttaagcgcccacataccaaacttgctgttagtatattggtatagagtaggtgagtgaaagtgaataatcacttcgccgccaagtgcttttacagtcagtgctacaataaacttacgagtcattgaaaaccatgggccacaatgaagccaataaatccggcggcgcttaatattttttagtgaactaaaaataagcttaaaccaagcattaacaaaataaagtatggtgcctttactatcgttgtgagtattgatccgctcgaaaggttgccctaactttaaaaaagcttcttcaaaagcttttaaaactgtacttataccgccttttgtttctgttgaatgcgtaccgacgatatatattaaagggtttctcattttaaaagcctgttacgaaaatgagcaagaataggtaaattgctggataaaaaataacgcattttctttacctgaaggccacaaaaaagctgtttaacaaataaacttaaagggtagcgtttcttttgtgctaccaaaatcaaaaaagagaggttttctttgttacagcgtgacatgtcttgatgatgctttttaatatactggttgtaaccagtcactttatttttaacagttgtgatacgggtttcttcgtggccttgatgctgtatgtaagaataaccttttaacatttttgcagggccaaattgctttattagtcgcgtccatgtgtcgtaatcctggcaagctttgaaagaagtatcaaaaccttttatcaatttaagtttgtaagtttcagtaaaaacttggtttgttgcatagttataactcaagattttagcgagcgagatttcacctccgccagcatcaatcactttaccttttttgccataaaaccataacacgccatgggataaaaaggcgtagtttggatcatagttactaacaagcgactctaaccggtgaggtaaaaactcatcgtcgtcatcaaggcctgtaatgtatttaccttcagctatattaatcgctttatttctggctgcacacgccccaatgcttgtttgttgatgaattactcgcacacgaggttcaatgctacttaactcgtctaaccagctttttgtttgcgcactgtcagtagaaccatcattaactattattagctcaaagttagtaaaggtttgatttaaaacagattcaactgctcgctttaataatggcaaacggttcttagtgggaaggtatattgatactattacatttttctcttccactatactgcatgcccatattaatcaattatttttctacgcttatggtatctgtatcaactgtaaatatcaaaacacagaaccataaacagatcgttttatattaacattattccatagtagaatgctggagtttttgcagtaaaaagttagatgacacgttcaagcacaaacaaaaggcaagcagtaataatttagtctcttaaaccgatcgcaacttttgaatcgatcttaaggaaaacaatgaaagtattaacagtatttggtacccgccccgaagcaattaaaatggcgccgctagttcttgcgcttgaaaatgatgcaagaattgaagcaaaagtgtgtgtaacagcgcaacaccgagaaatgcttgaccaagtattggacctttttcaaattacgcctgattatgatttaaacataatgaaagcaggccaagacctatacgacatcaccagtaaaattttactcggtttacgtgatgtgcttgatgagtttaaaccagattgggtgcttgttcatggtgatacaaccactacatttgcagcatcaatggccgctttttacaagcaaattaaagtagggcacgtagaagcaggtttacgtacaggtaatttgtatagcccatggccagaagaagcaaaccgcacattaacgggcgtattaacagcaaaacattttgcccctacgcaagcgtctgccgataacttattacgtgaacacgtatcaaaaaacgctatttttgtaacgggtaacacggtaatagatgcattactgcaagttaaaaataacgtattgccaaaagacgatgtacagcagcagctaactgacaagttcgctgaaattttagataaaccttatgtactcattacaggtcatcgtcgcgaaagctttggtggcgggtttgagcgaatttgccaatcaatttcgtcgttggcctcaaaataccctgactataactttgtataccctgtgcacttaaacccaaatgtacaagagccggttaaacgcttgctggcagataaaagcaatgtaaagcttatcgatccgcaagactatttaccttttgtatttttaatgaatcaagcgtatttaattttaacagactcaggtggcgtacaagaagaagcgccaagtttaggcaaacctgtgttagtaatgcgtgatacaacagaacgcccagaagcggtcgctgcaggtaccgttaagttagtaggcacagacaccgataaaattataaacgcggtgagtgagctgattgaaaataaagaaacatataaagaaatgagctttgcacataacccttatggcgatggaaaagcatgcgagcgcattattgaagggctatttactaattaaataacctacacctgcctacaataggttaagagcttagctatttccaatgtaagacaaggcttgcttgtgagcataactatttatgcttacaagcattttctagtactcttttatttaaaccgcttttagaaacaaccccaagcttgaaatatgcagacttgcctgtataatgcgccctacttaaggatgttccaatgtaaatggatagtaatgcaaagttgctaaattacgaataatcaagtcagttatgtcttcgactttaattacttcttaaaagaactccatagaaattgtaaaagctttactactaaagtgctttaaaaagctgccttagctgcatttttcaagtgaatagtaccgtcatgcttttgtatataaatagatgtgtttagccttgattcaaggccttgttaacttgcgtataacaagccgtcatgctttaattgatcagctttaaaataagtaagtgtaaacttatataataatcttttaggaagaagaatggcgttcaaatttaaactccttgcagcaactttatctctcctctctgtaagtgcatgtacaatcataccaggtagtcattacgaaggtattgattcaggcgctcaagtagaaaacttagaaaaagacctcgaaaaagtcaacattcaagttattgattcttctttaataaatattcaaaaacgcgaagttaaacaggttaatacaactaaccgaaaaggcattgatacatctgattatcaataccgcttaggggtgggtgatgtgttaacaatcggcgtttgggatcatccagagttaactattcctgcagctgtacaacgtacagccgagtttgatggttttcgtgtagcagaagatggcacaataacttatgcatacgcacctaaaataccagcagcaggccgcacagttgcagaagtacgcgctgacttggtaaagcgcttaagtcgtgttattgaaaacccgcaagttgacataaaaatagttggctttagaagtcaaaaaacttatgtaacaggcgaagtagaaaacccaggtgtatacccaattacagaaattccactcacaattatagacgtattaaacaacgcaggtggtattactgatcgtgctgactggcgagaagtaacttatacatcgggtaacaaaacagaaataatccgccttgatgacttttacagccatggtgatatttcgcaaaaccgtttattaaaacatggcgatattgtgcatgttagccgtaacgacaaacaccaagtgtatgtattgggtgatgtaattaaagcaggcacggtagatattgaccgctatggcttaaacctagctcaagcattaagtgataccggtggtattagagaagcaaccgctgacgcaaacggtatttttgtattacgtaagcgtgacctagccaaagatggcgtaattgcagacgtataccaattacacgctaaaaatgtagcagcactggtattagcagagcaatttgagttaaagcctcacgatatcgtgtatgtaacttctgcaccgcttgcacgctggaaccgcgtaataagcttattgttaccgtctattgctacggttgactcaattaacgatgtagccaatacaaactaaggataagtatgtttgactcagtattagtagtgtgtgctggcaatatttgccgtagcccaactgccgagtatgtacttaaaagtaagttacaaaacaaagggattactgttacttcagctggtttaactgcattagaaggtaagccagccgatgccactgctcagcaaattgctgagcagcatggtattaacatggcagagcaccgtggccaacaaataaattcagcattagtacagcacaacagcgttattttagtgatggaacatcgtcatttaactgacttgtgcgcacgttatcctcaagcaagaggtaaaacgtttttgttaggcaaatggttaaacgacaccgagatccccgacccatatcgtcagagcttagaagcatttacccatgtttatgagctaatcgacagcgcttgtagcgcttggcaaaagtatttataaggaaactgcattaatgaatgctcagccttcaacgctaaataatagtaaccgaacaacacaaactagcccgcaagagtcgcaagaaatagatttaatggcgctactgggtgctttacttgaccgtaaattttttattatggccattaccggcgtgtttatggtgctgggtgtaatttatgctttgtatgcagcacctgtttaccaagccaccgcgatgatacaggtagaagacaacagcgccacggtgccgggctttgacgacatgagcggtatgttcgaaagtacctcggccgcagtaaccgaaatagagctgttaaaatcgcgctctgtaattggcgaggcagtcgacaaattaaacctagatacggtagttaaacctaaactattcccattaataggtaaccgcgcataccgaagctttaaaccaagctcaccgggtgaactggctgagccgagttttggcgcaagctcttacgcatggggtggtgagagcattgatgtatttaggtttgatgtacctagctttaatattggtactgagttcgttgtgttagcacaacaaaataaccaattggcactattaaacgaagctggtgaaacagtattaactgggcaagtagggcaagagctttctaacggtattattgagctaactgtacgcagtttaaatgcacgcccaggtactgagtttattattaccaaacgtgaccgtttaaataccattttagatttacaagcagctataggtgccagtgaaaagggtaaagattctggcattattaacctaaccttacaagatactgattttagttatgctgaaaaagtgcttgagcaggtggctggtatttatgtgcgccgtaatgtagagcgcaatagcgcagaggcacaaaagtcacttgagtttttagaagttcaacttcccgaggttaaaaaacaactcgagtatgccgaaaagcgctttaatgattaccaaattaagcagcaatcagtaaacataacgcttgaaacacaaggcgtacttgaccaaattgtacagctagaaactaaattacaagagctagaactacaaagactagagcttagccgtaagtttaaaaaaggccatcctgcttaccaaggcatacttgagcaaattaaagccgtaaaaaaacaaaaagatgacttaacgggagaagtaacaaacttaccatctacccagcaagaattattgcgtttaacccgcgacgttgaggtaagtaaccaaatttacactatgctactggctaaaactcaagagctcgatattgtgcgtgcaggtactgtaggtaatgtacgcattatagaccatgcagaggtgaatacatcaaagccggtaaaacctaaaaaagcactaattgtggtaatggctacgatgctggggggcatgcttgcggtggctattgtattagtgcaaaaagcgcttcataaaggtattgaagaccctagcgaaattgaggcaatgggcttaccagtttacgcaagtgtgccgtattcagaccaccaagatcagttagtatcgtttggtaagcttaaaaaccgaaaagctacacaagcgaataccatattggcagttgaaaaccccgccgatttagcaatagaggcactacgtagcctgcgtactagcttacattttgcgatgatggaggcaaaaaacaacgttattgcaatatccggcccaagcccaggcgtgggtaaatcatttatatcggttaacctagcaaccgtattagcacaaagcgataaaaaggtattaataattgatgccgatatgcgtaaaggctacttacaaaaagcgtttaacgaaaaatgggaaaacggcttaagtgactttttatctggcaggttagagcttaaaaatgtaattaagcaaaccaaaataccaaatttgcatttaattactcgtggccaagtaccgccgaacccatctgagttattaatgcatgagcgcttttcaaagctggttgagactattaaagaacattacgacttaataattatagatacaccgcctattttagcagtaacagacccagcaatagtaagcgcacatgctggtagcactctacttgttacccgttttggccaaaaccatgtacgtgagttggagctaacccgcaaccgatttgagcaaaatggtattgatgttaaaggcgttgtatttaacggcatacttaaaaaagcgagtaatgcatatggttattatggttactataactatgagtataagtcagggaattagccattaatttggctataagacttgtggtaaatcaaaattattccattgtgttgtaatttagattaactactaagtaggttcaactaaatggtttgtattgaaagttaaagttttgaaatagtaagccaatatagaaatttatttaaaatttaagagagtaataaaatgcatcattcattaacggatctaaagattggcataattggtttaggttacgttggcctgcctcttgcagtggagtttggcaaaaagtatccgacattaggttttgatataaatcaaaagcgtgtaacgcaattaaaaaatgggcatgacgctacacttgaagttagcgacacagaactagcaaatgtaattagtctagcttactcatctaataaaaatgatttagcagaatgtaatgtttacattgtaacagtaccaacccctattgatgagagtaatgcccctgatttaacaccacttcgtaaagcttctgagttattaggggagtttgtaaaaaaaggtgatgttgtcatctatgagtcaacagtttatccgggggcgacagaggaggtctgtttaccaatcatcgaaaaagtatcaggtttgaaatttaataaagacttttttgcagggtattcaccagagcgaattaatcctggcgataaggttaacacgctgactaaaataatgaaaatcacttcaggctccactcctgaaattggggagtttgttaatagcctttatggttctatcatcacagccggaacgcatttagcaagctctttaaaagttgcagaggctgccaaagtaatcgaaaacactcagcgtgatttgaatattgcaattattaatgagtttgcaaaaatctttaaccgcttaggtattgatactgaagaagttttaaatgcagcaggaactaagtggaacttcttgaaatttaagccaggactagttggcgggcattgtattagtgttgacccttattaccttacacacaaagctcaagaggtgggttaccgccccgaggttattttagcgggccgtcgaattaacgatggtatgggggagtacgtagctactcaacttgttaaaaagttagccagcaaaaaaatccatatcgatgaagcaaaagtactgattttaggctttacctttaaaggcgattgccctgatgtacgtaatacaaaaattatagatatagttaaagagctaaaagattttaatatgtcggtagatgtatacgatagctgggcaaactcagatgaagtaaagcatgagtatggtgtagagctaattacaacgctagagaaaggcaaatatgatggtatcgtattagctgttgatcattctgaattaaaagaaatgggcgaaataagcttgcgtgcgctaggtaaagaaaatcatgttttatatgatgttaagcacgttcttaaaccaaatgaagccgatatcagactataaaggacttaaattaatatgaaaaattttgccctaattggtgcttcaggttatatcgcaccacgccacttaaaagcaattaaagaaactggtcataacttattggttgcaatggatattaacgattctgtgggtattatggatagccactttccagaagcggagttttttactgagtttgaagactttaccgcatacgttgaagatcaatcaatgcaaggtaataagattgattacgtttctatctgtagccctaattacttgcacgcgcctcatatgaagtacgcattaaaaaatggcattgatgttatatgtgaaaaaccactggttctgcattctgaagatatggatattttaaaagaatacgaacaaaaatatggtgctaaagtgaattcaattttgcaattgcggttgcacccatcaattattgccttaaaagaaaaggttgctgcggcacctgtaggaacagtttttgatgtagatctaacgtatatgacatctcgtggtaaatggtacatgaaatcttggaaagggtttgaccataaatcgggtggtgtagcgacgaatattggcgttcacttttatgacatgctgcattttatttttggtgagttaaaacataatgaagttcattttagagacgaaaaaacttcatgtggttaccttgaatatgaacgtgctcgcgtaaaatggtttttgtcaattgacgcaaataacttacctgaaaacgctgtaaagggtgaaaaactcacttatcgtagtatcacgataaatgatggcaataacacagaggagttagaattttcgggtggtttcactgatctacatacacaaagttaccaaaatatcttagcaggtaacggttttggtgttgatgagaatcgtgtggcaattgaaactgttgaaaaaatccgtgaaatgccaattgtagttgcgagtgataaagctcaccccttactttcaaaggtactttagccatgaattatcatgtacacgatagtgccattgtagatgatggcgcaaaaattggtgaaaacacgcgtgtttggcactttgttcacatatgtagtggtgctgagattggtgagggctgctcgctaggtcaaaatgtgtttatcggaaataaagtaacaattggtaataacgttaaaatacaaaataacgtgtcggtttacgataatgttcacctagaagatgatgtgttttgtggccctagcatggtgtttactaatgtttataacccacgctcatttatagagcgtaaaacagagtatcgcgatacgcttgttaagcaaggcgcaactcttggcgcaaactgcacaatagtgtgcggggtgacaataggagagtactcactcgttggtgcaggcgctgttattaataaggatgtaaagccattcgcgttaatggtaggggtacctgctaaacaaataggctggatcagtaagtatggtgagcagttagatttaccgctcgaaggaaatgctattgctacatgtgagcacacaggtgagcaataccaattagaaaacggctttgtttcgattcaataatttttagaagtactgataaatgcaattcatagatttagctgcgcaataccagcacttaaaaactaaaataaataagcgtatacaaacagtgttagaccatggccattatatcatgggaccagaagtacaagagcttgaggaccagcttgcgagctatgtgggtgttaaacatgccattacttgtgctaacggtacagatgccttaacgctcgctatgatggtgataggtattaaagagggggatgctgttttttgcccaacctttaccttttttgcaacggctgaagtaatcgcgtttgagggagcgactccggtattcgtcgattcagacgaagcaacatttaatatttgcccaatcgatttagaaaaacgtattcaagcaacgattgctgaaggtaaattaacgcctaaagcaattatagcggttgatttatttggcttaccagcaaattatccagaaatcaaaaaaatagctgacaaatacaatttgaagctggttgaagacgcggcccaagggttcggtggtgaaattgatggcaagcgagctggtagctttggcgatattgcaacaacgagcttcttccctgcaaagcctcttggttgttatggcgatggtggtgctgtttttactaataatgatgagtatgccgagttaattaaatcgtaccgtgtacatggaaaaggcaaagacaaatacgataatgttcgcattggcatgaactctcgtcttgatacgattcaagctgcgattttattagagaagcttgcggaattcccaacagagcttattaatcgtaataaagcagctgcaaattacgagtctcaattagcgtcgaaatacaaaacacctcaagttccaacaggttatgtaagctcatgggctcaatataccttagtgtcagccaatcgtgatgccgatatggctgaatatagagagcaaggtatacccacaatgatttactatggtacttgtatgcatgagcaaacggcttttagcccattggggcacaaaacaggggattttccgattgccgaaaagctagctaaatcagtgtttagtttgcctatgcatgggtacctttcttcgatagaactgttaaatgttaaataaacagaattttttgagaatactaaatatcccaatagttaaaaatattgggattttggtcggaggtacagctttttctcaattgattagcttattggccttacccatattaacacgtttatatacaccagaagactttacagtattagctacattcagttcaattctcgcgttgttaacggtagtatcatgtttgcgatttgaaattgcgataccaatgcccaaaaagcaagaaattgcaatgcaactatttttgctttcaattattagcgttatatgtataactattttagttagtgttgcattatttctatggggggagtatttcgatgagttaactaataataggatgcagggctattattggttaattcctataggggttttctgtgcggggttttataaagcgttacagtactggatgactagagaaaaaaattttaagttggttgctaaaacgagaatgacgcaagctgtcagtggggctgcttttcaaataggttttggtagtttcggattagcacctaccggcttgttaattgggcaaatattaaattctggtgctggtgtctatggcttgttgcgccatttgattaaaagtaataaaggctttctttttgcattcagccaccacgatttaaagaatacgtttaaacgttatgatcgttttccaaaaatctcaacctgggaagcattatttaacagtgctggaatacagcttcctattcttattattgcttcgttgttaataggggaagaggctggattcttaatgttagctatgagattgctatcggctcctttgggtttaattggtggttcagtttcacaagtttacctttcagaggcccctgagaggtatcatcaaggaaagttgaagcagtttacaattaaaactgttcttgctctagcgaaagttggctttttaccgctagccgcaattggtgttttatctccttatttagttcctttagtgtttggagaggagtggcagcgcacaggtattttaatatcttggatgataccttggtttttcatgcaatttataacttcacctgtttcaatgtcactccacatttctggattccaaaaagctgccttgtttttacaagtttttggattgtgtattcgggggggaggggtgttttatgtagcactttttcaccagtattggactagtgaattttatgcggtatccagttttgcattctactttatatacttaactttagttataacgttgttagattttgcttctaatgcggattggagggaaggtaaatcataatgatgaaaaggcttttttacagagcctatatcaatggtttctctctttcttatgggtataatataactttgggtttaatcgggtgcgctaggtaatttattaaagctcggtttagtatgctgcattgatatgtgtttttgctgtttaatgcaatgggagtttcggtatttacttattcataatattaattatatattggcgccttagctgaaattgtaaatgggttgttataattgtttgtaaatatattacctttattggtgttgctggtatcattttatctctttaagaaagtttccggcagtatgtcagtaacaaagctaaatatgattaattggattttttattttcaattagttattcagtgctttgtcgcttccatattgacgttaaatggttggactgagcattatgttttaatgacagcatcaaaagacgcaattttgtatggttctcttgctacccaatatacaatgatcgctttgccatttggtatgtggctaggtttaatattttttggttattcaaaaaacacaatcttgtttgaaagttttttagaaaaaagagtcgtcgggttgtttgatagcgaagatagggctgctaaagttgttttgtattcttttagtttaatgtctgttttttctgttgtttatgtattaacaaaaattgggagcatccctcttttttctgtgtttaataatttagatgccaccgaaattgcagctatgaggcagggagctagtcgtggtttttctggtaacgggttgataaaaaatgttttagcattaatgttagctccattgttggcgtatattagttattgttattggattattgatagaagtagggttaacagtgtgtggtttttcacaatgttaatctcatcaatttttatattgacatatgatttttctaaatctccattagtatttttttctattggttttatctttttgaatgtttttattaaaggcggagtgaaaaagaaaattattatttttttttccgcttgtacaatctctttcttggtctttatttatactttcctaatgaatgttgatgaacttacttctttcaattccggtatattggggcgtattttcttagggcaagcttcaggtatttatatggcttttaattattttccttcaacctttgagcatattggattttcctcaatttctcaatttctctcaagtgtgtttaatattgaatatagtgagcgtgcagcaaggcttgtcatgtttggctttaatccctcaggtgttgaaaatggtacagcaggtgttatgaatagtctatttatagcagaagcttgggccaattggggatggtttggggttgttttctctccagtttatgtagggcttgttattcaaggtctttacatgttttttttgaggtctccaaaaaatccactcttgttaggtgcatatgcgtttttggctacaaagataccaattacaggaggggtgaatgattttatttataacccaatatttgcgcttgttttttctattctgttacttgtgtatttttgtacattggtgctaaaaagggtttaatatatcatgggaaagaaaataatttttcaccatcctttacctctcaacagtagagctacttctgcgagtggtattcggccattaaaaatgttagaagcatttaagttgctaggttatcgtgttgaactcgttacaggatacagccttgagcgtaagaagaagatagcgcggctgaaatataatataaacaatggtgaagtttatgacttcgtatattcggaaagttctacgatgcctactattttaacggatacgcaccacctaccattaagaccattttcggattttaatttttttgctttttgtaaaagtaaagatatacctatagggctgttctaccgagatatatactgggcttttgatggttatggtcacggcttaaataaaataaagagtttttttgcgaaagcttgttataagtatgatttgaagaattacaacaaatatttaacaaaattatatttaccgtctatagaaatggggaagtatataccgattgttaatgagagtatattttctcctctgcctccaggtcatgacgtaaaagaaatttcaagaaacgtaaaatatataaatagtaactgtttgaagttattctatgtaggtggaatgtcatcacattaccaaatgcaagtattgtttgaggtagtgtgtaaacaacctaatgttaggttgacgatttgtactcgagagtcggaatggctagctgttaaagacacataccctgtattaacagataatattaaagttgtgcataaaagtggtagcgagatgcaatcattaatgcaagaggctgatatagtgtcactttttgttaagcctcaagagtatagagagtttgcagctcctgtgaaattatatgagtacttaggtaataataagccaattttagcttctaagggcagtcttgctggtgaatttgtagaaaataatcgcataggctggagtattgaatataaagctgaggcattggtaaattttttatctaatttaataaatgatatgtccgaaattgaatcgataaaaaaccagatgcaagttgttgctaatcagcataattggggagctagggctcaacaagttatagcggatttatcgaaatgaaggttgtattattagctgcggcttcaagtatccacactttacgttgggctaagggcttaaattcaatagatattgaggttcatataatcagtcagcacccgctgatgggacaaattgataaaggtatcaaagtccatattttgccttttaaagggcttgttggctattttgctatagtgccaaaagttaaaaagttattgagtttgatacagcctgatttagtgaacgcgcattacgcaagtggttatgctacaaccgctaggctagttgggcatcgaccttggttgctttctgtttgggggagtgatgtatataatttcccctataaatcggcatttcacaagtggatagtaaaaggtaacctttactctgctgatgcagtcgcctctacgagtcactgtatggcttcacaaactcgtttaattgcacccaagctcgataaaatagcaataaccccttttggggttgatattgaacatttctctaaatattcctatgcaatgaaccccgttgttgatgctccaattgttattggtactgttaaaggcatgtctcatgtatacggtgttgatttactaattaagagctttgctttagtgcgtgaaaggttggtggaatccgattcagcttatgctaaacgattgaatttgagaatagtgggtgcaggtcctttaagtgatgatttaaagcaactagctaaagataaaaatatagcagatgtaacaagttttattggcaaggttgaccataatgaagttcctgttgagttagctaaacttgatgtttatgtggcacttagtagggaagaaagttttggtgtggcagttattgaagctggtgcagtaggtaagcctgttgtggtctcaaatgttggtggtcttcctgaggttgtactcgatggcaaaactggttttatagtacctccagaggatcctcttgctgcatcattagtgattgagcaattaattagggaccatagtttacgggaaaaaataggaacagctgcgcagttacatgtttctgctaattataattgggaagtgtgcctcgaaaatatgaaaaacctttatagtcagatgattaaagattttaatggagtaaacaaatgaaaaaaatcgtaacaattttaggtgctcggccgcaatttattaaagctggaagtgttagccgcgagatcgctttacatgatgatctgcaagagattatagtccacaccgggcagcattatgacgctaatatgagtgatatttttttcgatgaaatgaaaataccaaagccagattattttttaggaattggtgggcgttctcatggtgctatgactgggcaaatgattgaaaaaatagaagaagtattaattgaagagcagcctgattgggtgttagtgtatggtgatactaactctacacttgctggtgcaattgctgcatctaaattacatattaaagttgctcatatagaggctgggttgcgctcttttaatatggccatgccggaagaagtaaaccgcatacttacggaccgtattagctctgttttattttgccctacgcaagtagctatcgataatttgagctctgaaggagttgaaaagtggaaaactgcagtgcatttgtcgggggatgtaatgcaagatggtgcaattttttacaaaaatatctcccaaaaaccggaaaacttccatgtagatggcgattttattttatcgactattcatcgtgctgaaaatactgattcattagagcgtctctcgtctattgttgaatcactaaatataattgccgaagactgtactgtagttttaccactgcaccctcggacaagagccaagttagctaatctagattgtgtattatcaaaaaatattaaagtaatagaccctgttggctatctaaatatggtttggttaattaataattgcaaattagtgatgactgatagcggtggcttgcaaaaagaggcattcttttttgctaaaccgtgcataacacttcgcgatgaaactgagtgggttgagttgattgagaataactttaatattttagttggtgcagataagcagttgattattgaagcatataatgagcatgttttttctactgattttgataaaaatctttatggtggtggtactgcatcaaacctcatcgtgaatgctttacgtgacttagtatgatatgaaaaaaaatatttggttaattaatcagtatgcctcaacacctgagacaggcttagctggcaggcattattattttgctgaagagttggctaaacaaggtcataacgtgaaggttattgcaggtagtttttcacatgttttacgtgaaccaaaggttataaaaggtaattttgaaatagagcatcgagatggatttgattttgtttgggttaaaacatcttattataagtcttcgaatagtaagcgacgaatattaaattggttttcatttgcgtataagctattaaatctaccaaagttgttgggtgaaaaaccggatgttattttatactcttcagcaccgttaattgggtttttatcagctaagcacctttctaacaaattgaatacaaagctaatttttgaagtccgtgatatttggcctttgtctgttattcaaattggaggatactcagagagtcatccttttattcgtttattgcaatggattgaagacaaagcatacgctagttctgatttggttatctcaaatttaaagagttcagttggccatatgataagtcgggggctcgattcgaataagtttaggtggattcccaatggggtttcaatcaatgaagtttcagctgatgtaccattacctgatgaggttgttaagcaattacccaaagataaatttatcgtaggttatactggtgcttttggtaatgctaatgctttggattatttacttgaatcagctagccaacttaaggaatgcgaagatattgcttttgttctagttgggaaggggaaagaattggaagcattgaaaactattgcgagagaaaataatttaacaaatgtacattttgtagatgcgatccctaagcagcaagttcaatcaatgttgagtatgtttgatgtttgttatataggtttaactaacgatccgttatttaaatttggtgtatctccaaataaactttttgattatttatactctggaaaacctgtattatatgcgatcgattctggtgggtacaaacctgttaaagaagctaatgctggaattgaagttgagcccgaaaatgtaagtgaaatcactgcagcggtcttgaaaatgaaaaatatgaataaggatgatttgattgcaatgggggcaaatggaaaagcgttagtaattcaagattatagttatgtaaagctatcaaaacaattaaataaactgatcgcagagttatgaatattatattgacaggtgcaacaggttttgttggaaagcaatttgaagacagccccagatttaagttcaaacgtgtttatagaggctcaggcgacgaagctaacagcatatatattaatcagcttggttccaaaacaaattggcctcaaaatcatttcgataatgttgatgcaataattcatttagctgctttagcgcataataactgtagtgatgtaaaacagttaattgatgtgaacgtcaatggcagtgttactttggctttagcagctgctgatgccggggttaagcggtttgtttttgtcagttctattggtgttaatggtattaataatgcaaaagcatttactgcatttgatcttccgaaccccacagaagcttatactgcttctaagcttcaagctgaagttgcgttgaagaaaattgctgaagatactggtatggaattagtaattattcgtcctccacttgtgtacggtaaaggtgctccaggaaactttggtacccttttgaaggttgccgagaaaaacttgccattacctttaggggcaattaataatcagcgtagttatgttgctgttgataacttagttgatcttatagttacttgtattgaccacccaaatgcggctaacgaaacttttttagttagtgatgacgagacaatctctacatctaacttgttaaaaaaactaactttagcagcaggtaaaaagccttggttattacctgtgccggtatcacttttgaaggttttagcctctatagttggtaaaaaggcaattgtagagcggttttcgagttcactaacggttgatattgagcacactaagaaaacattgaactggaagcccccaattacattagacgaaggaattcgtcgttgttttaagtaaatttagactaatttaatggattcataaatgatacgtttactcgactttttatttgccttatttggtttattatttgccctgccatttttagttgttttatacattattggtttgttcgatacgggctcacccatttttactcaagagcgtgtgggccgaaataaaaagcctttcaccttggttaaatttagaactatgaaggttgatactgcctcggtagctagccacttagcaagtactgcatctattacgccatttggtggttttttacgtaaaactaagttagatgagctaccacaactttggaatgtattaaaaggcgaaatgagtttggttggccctcgccctggtttatttaaccaacaagagctaacagcagcacgtgatgctaaaaatgtttttgcagtgcgtcctggcattacaggccttgctcaagtaaatgagattgacatgtcgactcctgaattacttgcaaaaacagatcgagagatgatcgatactctaaatttaagcaattattttaaatatatactcatgacagtgactggcagtggtagtggggatagggttaagtgaaaggttactaggttctagggaagtgaataggctccagaagaagtctagggaactaagggtggtaattatgcaatttgaaaaactggatgtttggaaaagggcttctcgtttagcttgtgatatctataaagtgactaaagattgtaaggattatggctttaaagatcaggtaacgcgttcagctgtttctgtgccctctaatatagccgagggaatagagcgtgaaactgtgaatgatgaatctaaatttttgtattatgctaaaggttctgctggtgagttagttacacagctttatattggcattgaaattggatttatagaaaaagagcatggattaaagctagtatccgaagctaaagaaattgcagctatgattgcttagttaataaagcgaagaaagggttttgttaaagagcgagagtccatttatggtgttggcagctcctagctcctagctcctagctcctagctcctagctcctagctcctagtactctttcacatatattttgatcagttgcccctacttaaattcaggtaactgatctttttcaatcaataattcaatactcctgctttttccagtaactgatgttataaatttcttcttcttaagaactgaaatcattgaatgaacacttgaagatgcggttccaaagtagcgctcaaaatcactttcagcaggcgcaatcccattcacttttgtgtagtaataaataaatgctaaatactgaccttgctttgctgtaaacagtggcgactcttctttattcataatgaacttttaccctaatcaacgatcctttaactcatataaacttacttaatattgttatgaaccgaaagtatattgttgaattatcagaagaagaaaaacaagaattagtagactattgcaaaaaaggcatggtcaatgttcgaaagtacaagcgggctgctattttgttaaaagctgaccgttgtagatatacaacagagcaaatatgtgaagctgttcaagtgagctcttccaccgtatttcgagtcaaacgccagttcgttgaagagaatctagcggcagctttgaatgaaggtgcacgaagtggtgcaatgagaaaaacttctgcgaaagatgaagcaacgttaatcgccacagcttgcactaagccaccaacaggtcacgctagatggacattatctttacttggagagcgattagttacattaactgatttagatagtatctcgtatgaaacaatacggaggcgtcttaaagaaaatgcactaaaaccatggcaaaaaaagatgtggtgtgtggcgacaatggatgctgaatatatcgcgcggatggaacatgtgctcgagttgtatgctgagccagcagatgagttaaaccccataattaactttgatgaggcgatgaaacaacttgtagatgatactcgaccggcacaaccaatgaagcaggggcagactaagcggttagattatgaatataaacgtgtaggtgtggccaacttatttgtattcttcgatcgccatcgaggatggcggcatgttaaagcaacagaaagaaagacgaaaattgactttgctaattgtatgagggatttagttgatcttcattatccacatgcgaacaaaataaaagttgtgttagataacttatcaactcatacagaaggagcgttatataaagcattttctccacaggaagcacgccggattttaaataaactagaattacattacacaccaaaacacgcgagttggttgaacatggtcgagatagaaattggtaatatgaataagcaatgtttagatagacgtatagcaagtatggaagaactaaagacagaactcgcggcctgggaatggagcaggaataaagaaagaacaagtataaactggctatttaatgttgaatcagctcgtgaaaaacttgagagggcttatggtgccctcaactagtcagaacttgtgtgatgaagtactagctcctagctcctagctcctataattcttttaaattcaataattagtgaaaatgtattagttcttggtgatttttactctcactagctatattatagggatgtataacaatcattaagcttttgctcagttaggacaactgataattcaagcttaatacaaaagggatttcaagtggacaaaataatagactctatctttaatgcgcctcgttctaaaaagcgtgccatcactttagttgttgattcattttttattttttcggccttttggcttgccttagttgttcggcttgacagcttgacccccttgtatgtgcttgagtactggtttgtacttggcttgttgttacctacttcattagttacttttgttaacctaggtttataccgtgctgtgttgcgttatatgaacgctcaagcattgtgggcgattgttattggcactttaattgccactgtagcattggttatattttcgttttttttaggggtgatgatgccccgttctatgccttttatttttgcttggctttgtttattaacagttggggggtcgcgtattgtagtacgcgccatgatcggcaaaatgtctacctcacataaagagcaagttattatttatggtgcaggttcatcgggtaggcaactagcaacagcgctagaggccggccctgagtaccatgtacgcgcatttatagacgacgatgtaacaaagcaaggctcaattattcaaggtgtacctgtatatgcatttaacgatatacataccctaattgataaacgcaacattggtaaaatattgctggctatgccaagcgagagtcgctcacgccgtaaagaggtacttgcgcaattagagccgttagcaatacagattttgtcgatcccgggtatggccgatattgtaggtggtaaagctaagctttctgaatttagagaagttgaaatagaagacctattaggtcgcgattcggtagagccaaaaccagagttaatggctgctaatataacaaataaagtcgttatggttaccggggcaggtggctctattggctctgagctgtgtaggcaaattattaagcagcaacctaaaaagcttattttgtttgaggtaaacgagtttggtttatattcaatcgaaaaagagttgtgcgaacatattcaagcaaatgaccttaatattgatcttgtgccaattatgggctctgttcagcgtataaaccgcattgagactgtaatgatcacctttggtgtgcacaccgtttaccatgctgctgcttacaaacatgtgcctttagttgagcataatgtggttgaaggtgtacgtaataacgtatttggtacctattacgcagctaaagcagctatgaatgcaaaagtcgaaacctttgtgcttatatctaccgataaagctgtacgcccaaccaatgttatgggggctaccaagcgcatggctgagttatgtttacaaggtttagcgcaaaataaaggtaagcaacataatactcgtttttgtatggtgcggtttgggaatgtacttggctctagcggctctgtagtgccattgttccgtaggcaaattaaagagggcgggccaataaccttaactcaccaagatataacacgcttttttatgaccattccagaggccgcacaattagttatacaagccggtgctatgggtaaaggtggcgatgtttttgtactcgacatgggcgaacctgtaaaaattaaagacctcgctacaaaaatgattcgcttatcgggttttgaggttaaaagcagtgccaacccacatggtgatattgctatagagtgcacaggcttgcgtccgggcgaaaagctttatgaagagctgttaattggcgataacgtaggtgaaacttgccacgaacgcattatgaccgccaacgaagtaatgctgccgcttgccgaaattaacgtatttttagaagcgtttgacattgcttgccataattttgatcacgaaacaattcgtcagctactattagacgcacctactggctttaaccctactgatggtatttgcgatttagtatggaatgctaaacaaagtaaagaaaagaacacaattaatgaactttcaatgagtaaagtcgttaatttaaagggttaactccagattgttatcctttgaaattattaaccataattttaaaggatattagtggttataaacataaaagtggtaaagtatgagctattcatattgagagcttgaatggctctacttttaatcagctttaatggataaccttatgaaaatagcagtagtgggtactggttatgttggcttgtcgaacgcaatgttgcttgcgcagcataacgaagtagtcgccctagatatagacgaacaaaaagttagcttattacaagttaagcaatcaccgattgttgataccgaaattagcgactttttagttaataaaccgcttaactttactgctaccactaacaaagagtcagcccttttaaatgctgaatttgttgtaattgccactccgacagattacgacccagacactaattattttaacactcgctcggttgagtcagtaattagtgatgtattggcaattaacccaacagcaacaatggtgattaaatcaaccgtgcctgttggttacactaaatcggttaaagagcagtttggtacagacaacattattttttcgcctgaatttttacgtgaaggcaaggcactttacgataacttacatccgtcacgtattattgtgggtgagcaaagtgaacgagcaaaaacatttgcaaatttacttgctgagggcgctgtaaaaaataacatcgacattttatttacaaattcgacagaggcagaagctattaagttattttcgaatacttatttggcaatgcgagtagcttactttaatgagctagacagctacgctgagagccatggcttagatgcaaagcaaatcattgagggtgtagggttagacccacgcataggtaagcactataacaacccatcgtttggctatggcggttactgtttacctaaagatactaagcagctactcgctaactaccaagatgtgcctaacaatatgatccgcgcgattgtagatgccaacacgacccgtaaagactatattgcaaattcaattattaaacaaaaccctaaggtggttggtatttaccgcttagtgatgaagtcgggctctgataactttagagcatctgccattcaaggcattatgaaacgcattaaagctaaaggtattgaggtagtcgtttacgagccaacctttgagggggatgcattttttaattcgcgtgtaattaaaaatcttgatgagcttaaagctatctctgatgtaattgtatcgaaccgcatggccgaagagctgcaagatgtagcaggcaaggtttatacccgtgatttgttcggaagtgattaaattaagccagctttaagccgagtgtgcatattcgcgcctgaggtgattatcgtcaccgtaggcgtgaaatttatttcgcgcgaagatcttgattgaaccacagagaacatagagagcacagaggaagagaatttatagaatcagatgagcacagtgttttttagttaatgtaggaggtactttagtgccgaagtctttaaggtaattcacggctaaagccgttcctacgaattaaagaacctttgaacaaagagaagtgaatgaggaagtgataataaggctttttgttttctctaaagcgaagcgtctcttaccctctttgtgaaacttttctttggttagtcgtatctcttttactctttgtaaacatcagtattcaagaaaaataaaattaaaaaccattcagcttgtatctactttgttactgttagtttggagttattgtagatttaattattaaataagggactaattatgaaagcagtgattccagttgcgggtcttggtacccgtatgctcccaatgactaaagcaattccaaaggaaatgttacctttagttgataaaccgcttattcagtacattgttaatgaatgtgttttagctggtataaaagaaattgtgctagttacgcacagctctaaaaacgcaatcgaaaaccattttgatactagctttgagcttgaggcaacattagaaaaccgagttaaacgtacgctgcttgaagaagtgcgctcaatttgcccaccagatgtaaccattatgcatgttcgccaaggcgaagcgaaaggcttgggccatgcggtattatgcgcaaaaccaattgtaggcgatgacgactttgtagtggtactgccagatgttattttagatggctacaccgcagatcaaaaaaccgaaaacattgctgctatgatcgagcgctttaacgatgttaaagcaagccagatcatgcttgaaccggtaccgcaagaaagtgttcacaagtacggaattgctgatatcggtggcgttaaaattaaagccggcgaaagcgcaccaattaaaactatggttgaaaaaccaaaagctgaagaagcaccatctaacttagcggtagttggccgttatgtgttatcaaaagctatttggccattactagctaaaactcctgctggtgcgggtggcgaaattcagttaacagatgccattgatgaactcatgaaaactgaggttgttgaggcgttccacatgagcggccgcgctcacgactgtggcgacaagctaggttatttaaaagcgatcattgagtatggtatccgtgacgaaaaactaggcggtgagttctctgagtttttaaacgatattgttgcgcctaaagtgagtcacttaaaagcggtttaatctctttgttagtttctgatatatctaaacgcctacacattgtgtaggcgtttttgtttattagatagcattttaaacacaaagggggcgaggattacagattgagataattaatagacttaaggtgaatgtgtagactctttactaaagtgatatttgataccgtaggtctgaaatttattatgcacgtaagatctcttttgaaccacagaggacacagagaacacagaggtaaatacggcaagactaaaaactcagaaagagctgtttggtagtgttatgttagtttgtgggatgttttggataccaaaattttaagagctttgaaccacagagggcacagaggaagagaaagagggtataaggtgctttatcttcagcccggtgttttatgagttttagtattaatttaattttctctatgtagcgcgtagcgcctcggtgtgctctgtggttcagagtgtttatgtctttaatctaattagaaccgtagagggcatagatagcacagaggaagagaaggaagtctttaagctttcagccgttaggtttcagctaaattgtgttgtttgtgggtcagacattggttgatggaatggtgttatatataagacgcaccaagcaggtgtgacgcctactgtttaatattttatttatccatgtagcgcgcagtgcctcggcgtgctctgtagttcaaaaagtatttttcgtattattagtaagataatttaagctattcttaaattataaacagcttttaaatgttcaatattagcaaggatggctatatggaaatggatataattacccgtaaagtaatagcgtgtgctattgaggtacataaacaattagggccaggtttattagagtctacctatgaaagttgcttggtatatgaattgctgcaagttggcttttcaccacttaaccaagttgagttacctatttcatacaagagcgtctgtttagatgctgggtatcgacttgacatattgcttccaaagtcgctaattatcgaattgaaagtagtagaaaagcttttacccattcacacagcacagttaattacatatttaaaattaaccgacatcaaaacaggtttgcttattaactttaatgttacaaggttggtggatggtattaagcgcattcaagtttagtgttttttcttagcttgaaaattaattggagccactgatgtatcaaggtcaagcgcctgcttactctgagctctcatcactatatagtgcgaagcgcctctgtgctctctgtggttcaaaattattcaaacttaattacatcataggcgctacagttagctcccttgtttaaatttctaattataactttgattttctctgtgtagcgcgcagcgcctctgtgtgctctgtggttcaaaattattcaaacctaattacatcataggcgctacagttagctcccttgtttaaatttctaattattaactttgattttctctgtgtagcgcgcagcgcctctgtgtgctctgtggttcaaaattattcaaacctaattacatcataggcgctacaattagctcccttgattaaacttctaattattaaccaggttttctctgtgcagcacgcagtgcctccgcgtactctgtggttcaaagttcaatatgtaggtaaatctatgtagctatttcaatcttagttttatcgcccagtagggcttggtattttttagccaaggttgctttggcttcgtcatcgccgtgtactattttgattaacttcggtttctttttcatacctgttacaaacctaattagtcccttttgatctgcgtgggcgctgtaaccactgatggtatgaactgccgcgtttatataaaccctttggttattaatatatacataaccgccttttgggccgtaggtttgaatatctcttcctagcgtgcctttgccctggtagccaacaaaaataatatcggttgttttgtcaggtaaaaactgctcaaggtaattaacaatccgcccccctgtgcacataccgctggcagctataataatcgctggctgttgctttgaacttaaaaagttaattaatgccttgtgctcttggtgtgtatcaattgtatgcagttggtcaaaatctaacgggtgacgcccttggttaactcgcttctttgcttcgttatcccacagggttttaaagtgttggtactgtgcagtaaagttggcggccatgggcgagtctacaattacttgtagtttatgccacattgaatttttacgagctgagtgaattatttgttctagctcataaagtagctcttgcgttcggccaatactaaacgcaggaataagcaccacgccgttatctgtaacggctcgttctataatattttttaaaccttttacacgcgtttttcggccatcatggtttttatcaccataggtcgattctattaccaaggtatcggcacggtatggcggtttaggtgagggcaataacggcgtatatggggctcctaaatctcccgagaataccactctgtgattatttggctttttgccaagttcaatttctacataggcagagccaagaatatggccggcgcgttgtaggcggattttaaataaagtttcttggctttgggggctcaaggctgctttttcggggctaaagccccaccctacaggtatggagtaccatttattaaaatctagactcactatttgctgttttagtcttcttatacaggtgtttattatggcttcatcacgcgttacccctagttttaaggcgtcttcaataacgagtggtagtagttttgcggttgctttagatgtgtatattggtcctttaaaccctgccacaaataggtagggtatgcggcctacgtgatcaatatggcagtgggtaacaataagcgcttttacggttgatatgtcaaagtcgatattgagatcttcgtgactgtcttcaccctgaaacagcccgcaatcgatgagtattgagttgttgtcgttaataataagctggtggcaagaccctgtaacaccgttaactgctccgtggtgttttatttgcataataatatccttatttttgaagcatagcctcagcatagaggttattgactataacggcaacgagcaaagttctacatgtagtgttggaatgttcataagctgtagatattgagttttaagttggatgagcaaactcttttaaagtcgaatacgataccttaggcgttaaatttatttcgcgcgtgagatttttttgtacaatttgcacaaagagaagtgaatgagaagagaatgaggtaaaccacaagattatttttattttctctaaagcgtaacgcctttgtgagttaaagacctttttttctaaccacagaggtcacagagagcatagaggaagagaaggagagaccaaacttttttaaatattggtttctctgtgaagcgccttggtgtgctctgtgattcaaatattgtttttacacaatgagaagcgaatgaggtaaaccaagaacttagctaatttgtgttccgctaaagcgaagcgtctcataatctctttgtgatcatttgttttctctatgcagcgcgaagcgcctctgtgttctctgtggttcaaatattgtttttatacaaagagaagtgcatgagaaaagaatgaggaaaccacaagattatttttactttctctaaagcgtaacgtctttgtgagttaaagacctttttttctaaccacagaggtcacagagagcatagaggaagagaaggagagaccaaactttttaaatattggtttctctatgtagcgcgaagcgcctcggtgcgctctgtggttcaaatattgtttaaacacaatgaaaagtgaatgaggaacccacaagattattttttactttctctaaagcgttgcgcctcttattctctttgcgagttaaagagcttttttctaactacagagagcacagaggaagagaccaaactttttaaatattggtttctctatgtagcgcgaagcgcctcggtgttatctgtggttcaatatgtttttaaaaaatttgcacaaagagaagtgaatgagaagagaatgaggaagtgataattacgttttttgtttcctctaaagcgcagcgcctcttgtcctctttgtgaattaaagatcttttttctaaccacagaggacatagagagcatagagaaagagatcataatctctttgtgatatttttactctatgcagcgcgaagcgcctcggtgtactctgtggttcaaatattgtttttgcacaaagagaagcgaatgagaaaaaaatgaggaaaccacaagattatttttacttcctcttaagcgcagcgcctcataaactctttgtgatcatttgttttctctatgcagcgcgaagcgcctcggtgtgctctaaggttcaaatattgtttttacacaaagagaagtgaatgagaaaagaatgaggaaaccacaagattatttttacttcctcttaagcgcagcgcctcataaactctttgtgatcatttgttttctctatgcagcgcgaagcgcctcggtgtgctctatggttcaaatattgtttttacacaaagagaagtgaatgagaaaagaatgaggaaaccacaaaattattttcttttaagcgaaaaaagttgtaactaactgtgagttaaagaactttcttataaccacagaggacacagagagcatagaggaagagaccaaactttttaaatattggtttctctgtgtagcgccttggtgtgctctgtagttcaaatattgtttttgcacaaagagaagtgaatgagaagggaatgaggtaaaccacaagattatttttactttctctaaagcgaagcgtctttgtgagttaaagaccttttttctaaccacagaggtcacagagagcatagaggaagagaaggagagaccaaactttttaaatattggtttctctgtgtagcgccttggtgtgctctgtgattcaaatattgtttttgcacaatgagaagtgaatgaggaaaccacaaggttatttttacttcctcttaagcgcagcgcctcataaactctttgtgagttaaagatctttttttaaccacagaggtcacagagtacaaaggaagagagcgacagattctaaatagttattctgataatctctgagtgattatttggttttctctaagatttaaatttcatttttgtattaactttttaaacatgaacaactaactaatttagttaattaatgctatattggcgttaacaaaaaattctaataattcttcatggattcgagttatgctaaaggcgaacactttactcattagcgggttagcaactctttgcgctcctgtgctagcttcagataaaattaataactatcaatcttttactggctatacaggcctaataaatacccctaatgcaaatgtaattgatgtaggcaatattgatattggttacaacaacatgcttgatcttagaggtaaagagtatattgatggtcataacttctcttttgctgcaggtttgtttgacggttttgaagtaagtggtttaattgctgccgaatctatgaacgataatatgttttatcccgagggaaagggccagttgcgagatgtatcgtttaacgctaaataccaaataccttacataccaaaaaactggttaactgttgctattggtgcaaaagatatcggcggtgcagcaaataactacgaaacttactacgctgttgcctctaaagaattgtgggattttagattttcagcaggttactcagtaagtgatcgtgctacaggccaaatggatggcccttttgctggtattgaatggcaaccatttgactggtttgcattgcaagcagaacatgacgcagatgcatttaatgcagccgcaaaagtcacagtgcctaaaaagtggttatacgatatcggtgagttaacattcactagccgtttttatagtaatacagactacagcgaagaagacacatcttggggtgttaacttcaaaatgccattattcacaaaacctgagtacgaggcaatcgaaagtgcgccagaacctgtggtatctgaaagtgatgaactagcctactttaagcttaacgctaataaagaacccgtaactataaaagatcctaacgcacaccgttatttcgaaagcaataaagaaatgacaaggcaagctgcaacgttaaagcatgctttagttaaagatggtttcgaaagtgtacaagtaggctttaataacgataagcaaattgttgtcaagtttgaaaactctacttttaatcgtaatgaccttgatgcaattggtttagtgcttggccgaatttcgcaatatgtaagcagtgaaggcattgaatttaatgtttttatgtctaagcaagatattcctcaacttagcctaaaaggtaacgtagacgagtaccgcgattttattctttcgcaaaagcatcctgaggtagttgtttatcaaggtgctatgccactaccaagagcacttacttgggttggtttaatgaatactaactcgccttactttaagccgcgtgtaacttttagccctgcacttacgaatgcctatgctactgaattaggagtatatgatttttcattagcgctccgcgccgatgtagacatacctttatggcaaggtgcgggtatcaaccttggtggccaggtaagtgtagctaatagcgacgactttgatgaagatgcagcatttaggtattaccgtgaagagtctgaatttgatagagcgacactttatcaaacattcgcattaccttatggcatttataaccaaacacagcttgggtattataaagaacgttttgatttttatggcatccaaaacgaaactacttggcttagtcctgaaggtcgccacaaggtaagtgcaaatattggttactttgactaccaagactacgatgcaaatagagattatcaaacaatagcctaccaatttaactgggttgagcatgatgttacgtttcatgctgaggttggtaagttttggaatgaagactcaggcattaaagtagaaagtaggttctggtttggtgatagttatctagctctttatggcgaagataccgatgcaagaaaaatcggctttgcgtttagtattccgctctcaccacgaaaagacatgtcagtaacgcgttacgggcaagtaaagggtacggaagcttggcgacactcgattggtacacgaattggtgaatctcaaaatacactgatttttaatcaagcttataagccagtaaatagtgttagcatcgaccgtaaatatctgaatcaggggcggttatctaaaacatatttatatgctaattttagccgcttgagagatgcttacttagaatacaaataatcattgtttctgttttaggaataaaaagtttaaaatcgacaaattgatttattttttgtaattctaattgctggattgtaaatattatctataatttttattgagccttttttagtaaaataaaggctctttgtgtaaaatcacagttgcaaatgttgtgattgttatttaacctatcaggtagcaatgggaaattattaattattttgctttcaactatgggtttagttggagatttccctgtatatcgaccttatttgatacgtttattttaaaaaaggaataaaaggactccctatgtttactaacagaaaaacgctactagctatgtctgtagcatcagtttttgctctttcaggctgttcgagtgatgacgacaaaaatgaggtcgtgccagatccagttgtaccaccagtaacagaaatcgttccacctgatacaattgttactgagcaaccagacaaaatattttcagtaaatgttattgatgctacaaacgctgatgctcttgttggtgcaatggttactttcatggttgatggtgaagctgcaactagcttagtggatcctaacggtgaagaacttagcatggttactgttgatgattctggtaactttactttccttccgaaagaagatgctacaggcgaagtaactgcgcaagtaacttttgacggttacgtaggtaaaagctttgttgttgatctagacgctcaagttgatgaaggttctaatgacattcctctagactttgctttagttcctgctgactctgaaggtttagcttcagctacaacagaagttgaacttacagacgctaccacgattgatcctatcgttgctgttgctagtaaagacggcgctaagtcagatgtaacaattcctgcaggcacaactttaaaagacgcaaatggtgatgctgtagctggtggcgctgttaaattaaatgtgttggcggctgattcaagtgtaagtggtactggtcttatcattcctgacggcttaaatgaaaacagcactacagaagtgaaagagtcacttggcgtaactaacatcacaatgactgctggtgagactaaagttaagcagtttactcctgctattaatgtatctgtaactttacctgctagcagtggtgtaagtgaaggcgacatccttaacgtatcttcacacaatgaagacacaggtatgtggaaagatgagcaattcaaagctacagtaggcgctgcaaatacagatggcacttatccggctagctttatgactgaccatttaacattcttctcaatgaatcagagtgttcctatttgtacttcaggtgtatcagttaaagttgttggtggtaccttacctgctcgtggactagcagtatctatgacttcaccagatggttctatttctagctacatcagaagtactactaaacagattatttcaggtgcatcgacagctcgctttggtatttcatctgatgcagtagctaaagttcgtttatatgatagagcaggtaacacttggtacgagcaagaaaaccaaccaatttgtggtgacgttgaagttacacttaataatacggttgagacattcgatagtgcagtaactcttaacggtgtttgtgctgcagataatacagttaatccagatctttctggctctattgtaacttatgctaaagatggtaaagcagcatcattagctcagggacaaggtaattcaacatttagccttgcaggccttgaagccggtggtacctacaaagtacgtgcaacaatccgtggtgcaaaagttgatggtggtggtcaatcacaaacattcacatttgagaatgttcagagcactgacactctaacaggacaagtttctattgagtgtgaagaaagagaagtaacaggtactaactaattgattatacttatttaagtatatctactttccaaaaccccagcttttgctggggtttttgtttttatacagcgcctaaatacggttaagagcaaaatttagattatgttattcagtatattttttcgctgtatttggcatttttgagccgaaaagtgcaaggttgctgtagacatgatattgattccgcgcgcagatcttttttcacaaagagaagtgagtgagaaaagaaagagtaaatccaaaaatactttatttacttctataaggctgggcttctgtgaattctatggttcagttttttattcataaagagaaaaaataatttttaaaacaatgtcttagagtttttcgctcttaagcgcagcgtctcttatcccctttgtgcgattaaatgcctttgatgtaggcgtgaaatttatttcgcgcgtgagatctttttgcacaaagagagggaatgagaacagaatgagagagccaaaacatcttaatttcttcctctaaagcgcagcgcctcttatcctctttgtgagttaaatatcttttttaaccacagaggacacagagagcacagagaaagagaccaaatctctttgtaaatattggtttctctgtgtagtgcgaagcgcctctgtgatctctgtggttcaatatgtttttaaaaaatttgcacaaagagaagtgaatgagaagagaatgaggaagtgataattatgttttttgttttcctctaaagcgcagcgccttttatcctctttgtgagctaaagatctttttcctaaccacagaggtcacagagagcacagaggaagagactataatctctttataaatatttggtttctctatgtagcgcgaagcgcctctgtgatctctgtggttcaatatgtttttaaaaaatttgcacaaagagaagtgaatgagaagagaatgaggaagtgataattacgttttttgtttcctctaaagcgcagcgcctcttattctctttgtgagttaaagatcttttttctaagcacagaggacacagaggaagagaaggagagacaataacctctttgtaaatattggtttctcagtgtagcgcaaagcacctctgtgatctctgtggttcaatatgtttttaaaaaatttgcacaaagagaagtgaatgagaagagaatgaggaagtgataattatgttttttgttttcctctaaagcgcagcgcctcttatcctctttgtgagttaaatatcttttttctaaccacagaggacatagagagcacagagaaagaacatctatagccgtaagctttcagctgaaatagtgttgtttgttagcactgtatacattttcttgaagggtgttgaatatcagttgtgctgcgcgatgtaaaatcgcgcctacgataactagcaactagcaactagcaactagcaactagcaactagcaactagcaactagcaactagcaactagcaactctaacctttatttatctctaaaatcgcttttaaagtatgttctttttcaagaatatcacggtaaagagcaaactgattacgggcacgctctaagttatggtttgcatgcttggtagcaaagtaattatcgccatcaataaagtctgttaaaaagcgcaggccaatcataaaggtcatgacctttgtgcctaaccaaaagctttctttttcagtgtcggtgatcacatcttttaaaggctcaacataaccttttacaatcgctgcaaatatctcttcacgaacacgaacattgctcaaattagtagaatcttcttgctcaggtgagcagaaggtgcgcaccatatcgccaaaatcaaataaccaataacccggcatacaggtgtctaggtcaatcactgcttttgcatcgtcagattgtgtgcaaaacagcatgttgttgattttagtgtcattatggcaaggtctaagtgggatcttaccctcaagctctttaagttcagttactaaaccttgttgtgctaaacaaaagtcaatatcgtcttggcatagcgctactctgcttgctggatcttttgctaaaacgtttttgaacgcgtcaaaacgcattgctaaattatgaaaatcagggatcacatgatgcaactgatcagcctgaaaatcttgtaaggctaaagcaaattgtccaaatgcattggctgcagtttgtgcttgcgatatggttgctaccacatcttcactgtagctgccgccaataaattcgagtgcgcgccacacgccttgatcacactccactaaaaagtcattttgaatggtcggtacatgacgaataatgtcgaggttatattcaccattgtcgtgcttttcagttaaatgctgttcaattaagcgagcattttcaacaagttgtttaggattcggaaaaacggttgtatttaacttttgaaccacaagtgcttgatcatctgcttttaatagcatggtggtatttatatggccattgccaatcggttttaggctaatatccactttatttaggccaaaacactctgataagtgttctgcaacagggttagacttcatagaaagttcacttttaaaatgcgtttgaacagctgtggttgctggttgttcgtccatgatgtaattcataaagctttttcgaaaccttttctagctcttctctgtaagtgacgccataccaggctgattgtgcttgatagaccatgacagattgttgattgtttttaacagcagtttggatttgatccggtaaataatactcttttgtgacaccgttgtcattatgttctaggaattgcgcaaagcctatttctaactcgttgaatatgtttggcgttactccccaaaaactcatagagcctagagcttcgttcgaaattacttcgcgcttaccctgagggttgtcaccatacaaggtcttatcttcaagttttatatttaaatactcaatcacattagtaagttgttgctgttcattcacttcacaaacaccacgatttacaccaccttgttcagaaagtgtgtttttgattggaaaaccaaccatggcccaatcgttattatttttaaagtgtttagctattatttcaaaagaggatgccccataataatcatcagcggtgatgacaatagcggggttctttacatagggctttgcacataacagagcatgcccagttccccaaggcttgatacgatctttcgctaaatggctgtactgctcaggtaccatactaatttcttgttcaacaagcacaacctcaagtgatttaggtaagcgaggcagtatggttgcttcaagttcggcgcggatttttttatttatgataataacagcttggcttacacctgcttttatcgcatcacgaatgcttaattccattatggtgcagcccaaccctgggatctctgctatttgtttatttccgccaaaacgactaccaagcccaccggctaatacgattaaagtaagagagtgttgtgtcattgtgtgaataagttaaaaaataaaggaaaagagtaccagaaaccccaaaggaaaaatattattggagccatcaatcgcaaagaattattttaaacgattgaggagttcaagaagctttaagcggaatgggtgatgcaggtaggaggtactttagtgccgaaaatatttttacaatgagatcagtggttcaatatgtttttatacgatttgcacaatgagaaaataatgagaagagaaagaggtaaaccaagaacttacttaatttttacttcaaagcgaagcgcctctgtgtactctgtggttcaaatattgtttttacacaaagagaaaataatgagaagaaaatgagggaaccacaagatcattattttacttcctctaaagcgcagcgcctcttaccctctttgtgagctaaagatctttttcctaaccacagaggtcacagagagcacagaggaagagactataatctctttataaatatttggtttctctatgtagcgcgaagcgcctcagtgtactctgtggttcaaatattgtttttacacaaagagaaaataatgagaagagaatgaggaagtgataattatgttttttgttttctctaaagcgcagcggctcttattctctttgtgcgattagatgtctttgatgtaggcgtgaaatttatttcgcgcttttttgtaggtcgtgctttagcgcgtcattgatgaaacgtacgtaatatcttgtcgccataaatgacgacttacattaacaaaatcgcatcttgcaccttgtgccttaaacctaatagcttcatatttacgtaggtggtatattccctatgtggtgattaaccccctttaggtagaagatttaatggcaaaagatagatatgcgccaaaggctcttggcgatattatggcgggcttgagtggtcgtttagcgtcttatgctggtaaaacccaaggcctgtcgagtcaacaaacgattttagacgagtttttaggtgaaacgctttccaaaaaatgccgggtaagtaattaccgcgatggtactttgatgattgaagcggtttctgcaccgattgcactgcgtttaaattatttaaaaatggatatgctctcgcattttcgtgccgctggtatggtagagcttggacaaattaaaattaccgctagcccacaagctacccagcgcttatctacatcaaaagaagctgaaaaaaaaccgcaagcaaagcgccatatgagtgagcaaacggcggactatttaacagctatcgctgctgacgcccctccatcgttaaaagaaaaattagagcgcttagcccaacacgggcggaaaaaataagcaaagccatcagctttcagccgtcagttttgagttgcccagcattgcctgttggttatgtgttgatgtgcatgattcgcgttgtatggcaggcgcgccaagcaagcgtgacgcctacatttgatgtaggcgtgaaatttatttcgcgcgtcagatctttctcacaaagagaagtgaatgagaagagaatgaggaagtgataattatgttttttgtttcctctaaagcgtagcgcctcataacctttttgtgagttaaagatctttttttctaaccacagaggtcacagagagcacagaggaagcgagaccataatctctttgtgatatttattttctctgtgtagcgcgaagcgcctctatgttctctgtggttcaaatattgtttttacatgatttgcacatagagaagagaatgagaagagagtgaggtaaaccaataacttacttaatttttttcctctaaagcgtagcgcctcataacctctttgtgagttaaatatcttttttctaaccacagaggtcacagagagcacagaggaagagaaagcgagacaataacctctttgtaaatattggtttctctgtgtagcgcgaagcgcctctgtgtactctgtggttcaatatgttttaaaaaatttgcacaaagagaagtgaatgagaaagtgataattatgtttttgttttcctctaaagcgtagcgcctcataacctctttgtgagttaaatatcttttttctaaccacagaggacacagagagcacagagaaagagaaggagagacaataacctctttgttgatagtggtttctctgtgtagcgcgaagcaccacggtgttctctgtggttcaatatgttttcctctaaagcgcagcgcctcttatcctctttgtgaatattatttttcactttcgctggtttcgcgatataaaatcgcgcctacaattgagctccttttttcatccctgatcttgattttatttcaattgtcgccatatctactcagtggtcttgttttcaccttttttatggggttagatcaaagattatggctgatttttaaattttcttgccgaaattccatatcttcacacacagaaggtttgatgttgcgcagactctggtatgatagcgcacgaaataagcggtgttttgaacagcgtactgataaattgttaattaatatgccctacatcatgagcataagcgcatattaattatcaattgaagaaagtgggttagctaatgactagctaacaaagaatatattgtaacggttttatcatgatatctaatttatttaccaagatttttggtagtcgcaatgaccgcactattaaaaacctaagaaagacggtcgctctaattaatgcgcttgaaaagcaattagaagcgctttctgatgaagatttaaaagcaaaaacagctgaatttagagagcgttacgataacggacaaagcctagatgatatcttaccagaagcatttgctgtggtacgtgaagcatctaagcgtgtaaatggcatgcgtcacttcgacgtacagctactaggtggtatggtgttacatcaaggtcgtatcgcagagatgcgtaccggtgaaggtaaaacacttactgcaacattacctgcataccttcgtggtttaacaggtaaaggtgttcacgtaattacagtaaatgactaccttgcaaaacgtgacgccgaaactaaccgtccattatttgaattcttaggcctaacagtaggctgcaacgtaccgggcatgatgccacagcaaaagaaaatcgcttatgctgccgacattacttacggtacgaataacgaatttggctttgattatctacgcgataacatggcatttagcattgaagaacgtgtgcaacgcccactttactacgcagtagtggatgaggtggattcaatcctaatcgatgaagcgcgtacgccgcttattatctcaggccctgcagaagacagctctgagctttatatcgaaatcaacaaaattgtgccagaacttgagctacaagaaaaagaagatgaagaaggcgttgaaggtgacggcgacttcactattgacgaaaaatctaagcaagttcacttaactgaacgtggccaaatcaaagttgaagaactattaattgagcgtggcttaatcgaagaaggtgattcactttactcagcttctagcatcacattattaagtcatgtgtatgcggcgctacgagctcacaagctgtatcaaaaagacgttgattacgttgttaaagaaaacgaagttatcatcgttgatgagcatacaggtcgtacaatggaaggtcgtcgttggtcagaaggtttacaccaagctgttgaggcaaaagaaggtgtgcgcattcaaaacgaaaaccaaacattggcatcaatcacattccaaaactacttccgtttatacgacacattagcaggtatgacaggtacagcagacaccgaagcgtttgagttccagtctatctatggtctagacaccgtagtaatgccaactaacaaaccgatgatccgtgacgatcgtgctgaccttgtgtacttaacacaagaagagaagtacgaagcaattcttgctgatatcaaagattgtcaagaacgcggccaaccggtacttgtgggtacgatttctatcgaaagttctgagtacttatcgcagttcttacgtaaagaaaaaattaagcacaacgtacttaatgctaagttccacgcgcaagaagcagacattgttgccgatgcaggtttacctggcacagtaaccattgcaactaacatggccggtcgtggtaccgatatcgtgttaggtggtaactggcacagcgaagttgaaaagctagaaaacccgactgatgaacaaatcaaagcgattaaagatgagtggcaaaaacgtcacgatgcagtaatcgaagcgggtggtctacacatcattggtactgagcgtcacgagtctcgtcgtatcgataaccagttacgtggtcgttcaggtcgtcaaggtgatgcgggttcaagccgcttctatttatcaatggacgacgcgctaatgcgtatcttcgctggtgagcgcatgactaacatgatgcgtaaacttggtatgcaacgcggcgaagcgattgagcacccttgggttaaccgcgcaatcgaaaacgcacaacgtaaagttgaagcacgcaacttcgacgttcgtaagcaactacttgagtacgatgatgtagcaaacgaccaacgtcgtgttgtttactcacagcgtaacgagctacttgaagaaggtgatatttcagaaactatcactgcaattcgtagcgacgttcttaacagtacgattgaccaatatattgcaccgcaaagcttagctgaaatgtgggatattccaggtcttgaagagcgcttaaaactagacttcttaattgagctgccaatttcacaatggttagctgacgatagcaaactatacgaagaaaaacttcgtgagcgtatcgaagaagcggttgagcaagcatacaagcaaaaagaagagatggtaggtgagtctgtacttcgtcaattcgaaaaagcgattatgctacaaagcctagaccaacactggaaagatcacttggcagcgatggaccaccttcgtcaaggtatccacttacgtggttacgcacagaagaatccaaagcaagagtacaagcgtgagtcgtttgagctgttctctgaaatgcttgagaacttaaaaatcgacgttgttggtattttaagtaaagtgcaagttcgcgcagaagaagatgttgagaaagttgaagaacaacatcgtcgtagcgaaaatgcaccacgtgaataccaacacgaagaagctgagcacattggtggcgaaacaccagaaggtgctacagtaactcatcgtgcagagcctaaagtaggccgtaacgagccttgcccatgtggttcaggtaataaatttaaacagtgttgcggtaaattaaagtaaccataatacgctgataaaaaagcgacgcttgcgtcgctttttttatgattgaggaataacaaatgacaaaaaaaatagtgcatgttgctgttggcgttatttataaagatcagcagttatttatttgtaagcgcccagacgacaaacaccaaggcggcttgtgggaattccctggcggtaaagtagagcagggcgaaagtgtgtttgcagcacttcagcgtgagctgttagaagaagtaaacctaaccgtaaacggcagtgaagagctaatggttatcgagcatgactacggcgataaatgcgtgcgcttagatgtgcacattgttgatgatttcacaggcactgcccatggtgcagaaggccaacaaagtaagtgggttgcactgagcgagcttgatgattacagtttcccagctgcgaatgttgagattatcgaaaagataaagcagaagtttgagctgtaagatgaacggtgttgttggtgggagatgcgtgtaagaggtactttagtaccgaaaatattttcacaaagagaagagaatgaggaagtgataattatgttttttgtttactctaaagcgcagcgcctcttgtcctctttgtgaattaaagatctttttctaaccacagaggtcacagagagcacagaggaagagaccataatctctttgtgatatttattttctctgtgtagtgcgaagcgcctctatgttctctgtggttcaatatgtttttaaaaaatttgcacaaagagaagtgaatgagaagagaatgaggaagtgataattgtgttttttgtttcctctaaagcgcagcgcctcttgtcctctttgtgaattaaagagcttttctaaccacagaggacacagagaacagccatttgtttaacaccaaggctagtgcttatttataaccgttagggtttttactttgccagcgccacgtatcttgcatcatctcgtcaatgccgcgctcagcttgccagccaagctcctttagcgccttttctggggcagcgtaacatgcagcaatatcacccgctctgcgcggcgatatttggtaaggaacagcttgtccgctggctttttcaaaggcattaaccatttgtaataccgaataaccattgcctgtgccaaggttaaatacgtgcgaacctgtatcactagcaatgcggttcagcgcttttaagtgaccaagtgctaaatcaactacatgaatataatcacgcacgcccgtgccatctaccgtatcgtagtcatcaccaaatacacctagcttttctaatttgccaactgccacctgagaaatatacggcagtaagttattaggaatgccattagggtcttcaccgattagccccgactcgtgcgcaccaacaggattaaagtaacgtaaaattacaaaggcaaagcgttcatccgatttagcaatatcttgtagcatcatctcaaccatgagtttagatgtaccgtatgggtttgttgtgccaccaacagggaagtcttcgcgaattggtaagcttgctgggtcgccataaaccgttgctgatgagctaaatactaatttgaatacaccagcgtcgcgcattgcatcaaccagcgttaacgtgccttgtacgttgttttggtaatactcaataggtttaataaccgattcgcccactgcttttaaacctgcaaagtggataacgctgtcgattgagtgctcactaaagattttatctaaacaggctctatctaaaatgtcaccttggtaaaacgtgacatctttacccgtgatttttttaacacgagccaatgactcatttgatgaattgcttaaattatcaagtacaacaacatcattaccctgttgtaataattctaaaacggtatgtgaaccgatatatccggctccgccggtgactaaaatggtcataagatttccataaactatacctgattaaattaggcttatttcatcatatttcgcgttaaattacatgaataaaatgtgattatcattctgtatggcaaggtgaggtagttgtttttgattacactttataccatattggttacacctagctgattacatattaagctatagttaatcgtcagctgctaaatttttaagcactagctacacctgttaactggagaatatgatgaatatagtaaaaaaagttgcgttagcgcttattgttacgctcccggcttttgctcatgcaggcgaagcaaaagttaaatggcatgactttaatgattatcgtgatgtacgcccagggaataactcaccaaaaggcgcatttcataaaaatgtggctaataattttgaaaaacactttaacaaactagctgaaaagttacccgaaggttatacctttaatgttgaggtgacagagctcgatctagctggtgatgtgcgttttggtaccatgaatgagctacgtattatcaaaccaatttactttccgcgtatcgacttaaattattcaattaccgataaaaacggtaaggtcgtaagcgaagcaaacgatgtaaaactcaaagatatgggattcatggatcgtatgaagatgggtcgtgacgaggcttattattacgataaacgtttaattactgattggttcgaagatgagctattaccgtcgttaaaccttgatgaatgataactcaaagctgtaagttttaagtcgaactgtgttgttttttggttttgtgaatttgcaagctagaggttgaatggtagatacgccaagcaagcgtgacgcctacgtttgatgtaggcgtgaaatttatttcgcgcgttagcctctattcacaataaatgaaatagaggcttctacgttacttaaacgtcgctaacagttgtaatagctgttgaagtttaataacggtttttttcagtttttcttcgtccataccgtcgttgcttaagctttctacatcagcagcaacatcgagaacgtaaggtttaaaacgttttgcttcaaaatcaaagccagcatcttttgcaaataaggcagtgaatttgccgtggccttgctgctgtaaatcatctaattttttatcggcatcaagtgcctgacggtaaacgatttttaggttagcattgagttgttcaataattgaatccatttttttcctaaagctttagactgcaatgccgatatagtacgtggattgtcataaaaagtcaggtaatgaactatgaatatatcaggatcaaacttacccgtaatgagtagcggtggtgaaagcgccgaagtttacagcgcatcgcttgctaaaaaacagcaaaaagcagaaggtgcagcagctctagcgctaatcgaaggtgcagccacatcgagtgcagcagcgcaaacacctgctaagtcggtaactgcgacactaggtaataacgttaacgtatacgtttaactagatagggcgtgttgaccctttatgattgattttgcagcagtgtgtttggtatttaggcaaggcagagcctatgcagtgtggttgttccccataaataggcgataacgcagcattaatgccaaacacgcgctgcccttcgggttcttcctaggggcgattaactctttgttactcgatttttacttagcccactaggttacaaatctcgcgccgcgattaaatcgcccctagagtgaacaaatttcaatcaataaaggtcaacacgcccttagatcgattggcgttttacttttttcgccgccgatctcgcgtactagcttaggaaccaagaaccccggcaatgctgccagcatagccgtcacgatttctcgtgcctgactctcagctatatcaaaatggctggcaccttccactttatctagtagatgtaagtagtaaggtaatatatcggcctcgaacagtgcctcacttagcgcaacttgcgactcaacagagtcattcacatcttttagtaacaccgcttgatttaataaggtaacacccacagcttttaatttttgcatggccgctttaaagtcatcatcaatttcattagcgtgattgatatggtttataaacaccacttttaacgatgatgcagcaaagcgtgcacatagctcatcggtaattcttgcagggatcaccactggtaagcggctgtgaatacgtaggcgcttaatttgcggtagctgttcgagctcatccataaaccaactaacggcatcgtctttggccatcaaagggtcgccgccacttaaaatgacttcgttaatattgctgtcggcttttatataagccagcgcatcaatcaagctacgtttgtttaattggttttcttgatacgggaaatggcgtctaaaacaatagcgacaatttaccgcacaaccggttttaaacatcactaaaacgcgagagcgatacttgtgtaacaaaccaggttggttgttatcttgctcttttaaggggtctttgtcgtaacctgtttttgctaaaaattcttgatggcgaggcatcacttgcagcaaaagagggtcgtttatgtcgccataacgcatttttttgataaaaggcagcggcacgcggacaggaaaaagactgcgtgctttgaggtctttttcgtctactttgcttgataatcctagcatttctagcaagcgttcaggacaagtgacaacatttgccaattctttttgccagtttttatgcaaatttacttcatttctttgtatcattgacacgtagattactcgaaattatttagacagaggaaacgatggcgaattatagcaccaatgagttcaagggcggcctaaaaattatgttagacggcgaaccttgcagcatcttagaaaatgaaatggtaaaaccaggtaaaggccaggcgtttaaccgtgttcgtattcgtaaacttatcacaggtaaagtactagaaaaaacgttcaagtcaggtgagaccgttgaaggtgcagacgtaatggataccgatttagcgtatctatatactgacggtgagttctggcatttcatgaacaacgaaacatttgagcaaatcgctgctgacgaaaaagcacttggcgacaacgctaaatggttagttgaaaatgacgtatgtacaatcacgctttggaacggtaacccaatcgccgttactccaccaaactttgttgaactagaaatcactgacacagatccaggtctaaaaggtgatacagcaggtactggcggtaaaccagcaacattaagcactggtgctgttgttcgtgttcctcttttcgtacaaatcggcgaagtgatcaaggttgatacacgtagcggtgaatacgtgagccgcgttaagtaataggctttgttaagcaatttattataaaatcccagcttctgctgggattttttttgagaaacagtttatgtctaaagccctttggcaaccaagcgccgatattgaaactttacgccaccgtgccgccatcattcgccgtattcgtgagttcttttatgcacgcgatgttatggaggttgaaacgccaagcttaagtgcggccagtgtaaccgatgtgcatttagcgacatttagtaccgagtttgttgggcctggtcatgctggtggcttaccactttatttgcaaacgtcacctgagtttgccatgaagcgtttacttgctgcaggctctggagctattttccagctatgcaaagcttttcgtaatgaagaggcgggtagtcatcataatcctgaatttacaatgcttgagtggtatcgtccgggttttgatgaatttgcgcttatggatgaaatggatgagcttatgcaattagtgctcggcgtagaaagcgcagagcgactcacttatcagcaagcctttgtaaacgccttaggtgtagaccctttaactgctgatgtgagtacattacagcaactagcatcagagcagggctttgccgatattgccgcgaatgaaacacaccgcgacaccttgttgcagctgttattttgtatgaaggttgagccaactattggccaagaaaagccttgtttcgtttatcattttccagcttcgcaagccgctcttgcgcaaatttgtcagcacgatgagcgagtagcagggcgctttgagttatattttaaaaatatggaactggcaaacggctttaatgagctgaccaatggcaaagagcaagcagctcgttttagtgaagataatcagtaccgtgaagcaaatggcttaaagcaagtgccaatggatgagcgtttaatagctgcactagagcatggtttgccacaatgtgcgggtgtcgcattgggtattgatcgactcattatgctggcaacgaataagcaaaagatcaaagacgtgatcgcttttgatgttgaaagggcttaaatgtaggagcgggtttaacccgcgattttcattgattttaaaagcgcgacataaagtcgcgcctacggtttatagctcgtaaataaatgtcacaccggcaaccattggttcgccaagttgtgtgtatgtatgagtggtgtaaccgtctaatggatcgttaccaaactcaaaaccacgagtcggtacgtcttcgtcaaataagttacgtgcccatgcattaatgctccaattatcactttcataaccaaatgaagcattcactaaattagtgcttggtgcttgtgagttatggctatcagagaagtagtaatcgtctttgccttctacaccaattgatgcataaagtgctggcgtaaagttataacgcgcagtgaatgcatattggtatttaggagcttgtgcttgatctcgaccatcttgatctaggcctgattgcgcaacaaagtcattgatttcggtatgtaaataacctgcactacccgtaagtagtaaattgtcagtggcttggaagctaccttcaatttctaaaccgtagttttcaccagagctggcattatcgatatagcctgtgaatttttgaccttcaacctgccacgattttaactgcatatcttcacggtacatgtagaaagcggcaagacgtaacacaaacttatcgtctagtgagctgcctttcacaccaaactcaccgctccaaaggtattcaggggcaaatgatgtgtgattagcaaagaaatcagcatctagatttaagccttcatcttttgcttttgctaacgcttcagaattaatgccgccggccttatagccacgagtaatgctggtgtagatcatggtgcgatcaatcacttggtattcaagtgcaagcttaccgcccaccatgacatcatcagtttcttcaataaaaccgttgttgtcggtgtagtcgccttgatactgctcgacacgcaaacccgtaattaaggttgtttttggaccaataggtgttgctagttggccatacgctgcaatattgctggtttcataatttgatgcaaatggttgcgccagccaagtgtattggcgttctaaatcaacttcgcggccttggtagtaaataccggcaacccactcaccagacttaccgctaaattgcagctcggctgcttgatcttgacgatcgcgaaagtaagcatctgttgagctatagccccattcatgcaagcctgcagcacataactctggttgggcttcatcattacacacccagtcttcgtcgtagctgtatagcagctcgctgtcgatacctgaaaggtttaggctaacatcaaaccaatcgaagccggtgtaaatgttggcaaggccaaccgcaatgctttcttggttatcttggcctggttcatcagccacactgtaacggctgttatccaaggtgaaggcgtcatagccgttattaatatcaatgtaatgaacgctcagttcagtacgtaggtgatcggtcaattggctgtgtaatttaaagcgagaaacgagctcatcttgttgttgggtatcttcgcctaaataacggttttcaacatagccatcagactcacgttgataaatacttgcgcgcactgctgtgtcgtcggtaatacccgtacctgcggcaatacctgcctcaaagctattgtagttacctgcacctagttgtactttcacacttgggtcaagagtgggtgttgcagattccatttgaatcatgccagctagagcatcagcaccaaagcgagttccttgtgggccgcgataaatttctacctggtcgatatcaaataacagtgaactgccgcctaaaccagagtagttgatgccgtcgatcactaagccaaccgaaggattaattgggtctacaaactgtgagcgtaaacctacaccacgaatttgcacgaaacgaccacgagatgcccctgaggtaaagtttacattcgctgcactagcaagcatttcatctaaaaactttgcaccacgttgattgatttcatggtctgaaaacaaactagcactggcacttaatgtttgaatgctttcttttttgaaatcaccggtaactacaatcgtttccaactcaccatcttcagcgtaggcaatcgaagatgctgcaaataaaggcaggatggcagcagataataatgataaacgtcgtttcatgtggattcttaactccattttcgggactgctattctagcaacctagctagccaaatggctataaaatcaatttttatggtataaacgcaggcaattatacgtaaattgattaggaatacgactatgacctttaaagtcgactttaaagtgcgtgattatgagtgtgatttacaaggtattgtaaataacagtgtttattttaattacttagaacatgctcgccatgaatttttacatgctcaaggtatcgactttgcaaagctagcaagagaaaaagtgaatcttgtggtgcttcgcagcgaaatggattataaggcatcacttgtgccgggtgatgaattttacgtggccgttgagcctgagcgtatcagccgtttaaagtttgcttttagacaaacggtgtatcgcaaacatgacgataaagtgatgctacaagcgttagtgattggtacgtcggtaaatgaaaaaggtcgtccttttttaccagaagaagtcgataacttattcaagtaagcgagagtgtttcaaaaaaatggggcttagaacaattttttacagataaaacatgtttttttaacgatcaaagcagtcaaatattgttactattatggtattggaatttgaattgtaaaaaatatgaagcgtttagccgtaccacttttgtttgtattattttgtttagggtgttcatcaaccagtacagtcacaagtgaacaattaaaatatactcagtggcagctatcaaaggtgaatggcttaagtcttgatgtgtcgcaaagtgcatcaatgcgatttattgaagcaatgcaaataaatggctttgcaggctgtaataaattttttggcgaagcagttctaactgacgatgattcaattgtagtaaacaagctaggcatgacacgtaaatcgtgcggtgagaaagccgatgaactcgaacgtagtttgttaaccgcgttaagagaaggtgcagccattaagcttgaaggtgagcaactgactttgcaaggtacgcaccgctttacctttatcgccaaaaactaaagcgcatgtgcttgcagcaaatttttaactaacgtacactcattgcgttaataaaaaataacgaatttaaacttgtcggagtgcctttaacaaggctgagatcgcgaaagcgggatccgtgaacctgatcaggctaacacctgcgtagggaacaagctgcctaactaggcgcttgtgcgccaaattttggggcataagcggcacaggctgcactggtaagcatttaacttactaacgatccaatggcgtttgccactctctattgcacttgcaatatctgacaagacaacccttaaagcaatgaggtaagtcatgtcaaacacaacaactaaaccatctcgccgcgaagttcgtgcggctgcatcagagtatatttataacttaacgggtcaaccgtttcctaattctcataaagtttatgtagaaggcacgcaagataatgtgcgagtagggatgcgtgaaatcaccctcagcgataccttcattggtggtactgaagagaatcccgtatttgagcctaacgcgccaattcgtgtttacgatacatcaggcccatacactgaccctgactttaaactcgatgtgcgcaagggtcttgagaaataccgtgaaaagtggattgaaagccgcggcgatactgaaattttagactcagtgacttcacaattttctcaacagcgtatggcagatgaagggctagatcatatccgctttgagcacttaccaaaaatccgccgtgcaaaagcaggtaaaaacgtcacgcaaatgcattatgcgcgacaaggcatcgtgacgcctgaaatggaatatgtggcaatccgtgaaaacatgggtcgcgctaaaattcgtgaagagttacttgcagcccagcacaaaggcgaatcgtttggtgctagtattcctgattttattacccctgaatttgtgcgtgatgaaattgctcgtggccgcgctgtgcttcctaacaatattaaccacccagaaaccgagccgatgatcattggccgaaactttttagttaaggtgaacgcgaatattggtaattcgtctgtgacttcatcaattgaagaagaagtcgaaaaaatggtgtggtctactcgttggggcgccgacacggtaatggatttatcaacgggtcgctatattcacgaaacccgtgaatgggtggtacgtaactcaccagtaccaattggcaccgtaccaatttaccaagcgcttgaaaaagtaaacggtgtggctgaagacctaacgtgggagattttccgcgataccttgattgaacaagcagaacaaggcgttgattactttactattcatgctggggtattactgcgttacgtgccgatgacggcaaagcgtgttaccggtattgtttcgcgtggtggctctatcatggcgaaatggtgtttagcgcaccataaagaaaacttcttatacactcactttgaagaaatctgtgaaattttaaaacagtatgatgtgtgtttctcactgggtgatggcctgcgtccgggctctattgccgatgcgaatgacgaagcccaattcagcgaattacgtactttaggtgagctgacaaaacttgcttggaaacacgatgtgcaagtattcatcgaaggcccaggccatgtgccaatgcatatgatcaaagagaacatggaagagcagctaaaacactgtgaagaagcaccgttttatactcttggtccattaaccacggatattgcaccggggtacgatcatttcacatcaggtattggcgctgcgcaaattgcttggtacggctgtgccatgctttgttatgtaactcctaaagagcatttaggcttaccaaacaaagaagacgttaaagaaggtttaatcacctacaagattgctgctcatgcagccgatttggcaaaaggccatccgggtgcgcaagagcgtgacaacgcattatcaaaagcacgctttgagttccgttggcacgaccaatttaatctaggtttagacccagaacgcgcccgcgaatatcacgacgaaacactgccacaagaatcaggcaagattgcacacttttgctctatgtgtggccctaagttctgctcgatgaagatcactcaagaagtacgtgattatgccaaagatcttgaagcaagaggcattgatccaaataacgtaggtgatgctatcgaaatcaaaatggtcgatgttgaagccgaaatgaaagcgaaatcagacgagttcaaaaaaacaggctctgagatttaccacaaagcagtttaggctagttgtaggcgcgattttatatcgcgctatttgcttaaatcttatcgtttaaggctgaggttaatatgtcttacaacattgcagtgattggttttggcttagcggggcgcttagcggcattggcgttaattaagcagcatcaagttacggtgtttgaacaagatgatgaacatgctagcaacagtgcaggcagcgttgccgcagcgatgttagcaccccttgctgaatcagtcctgtgtgaacaggatttagccctacaagggcttaatagcatcactcgttggcagcaaattttaagtgagctcgatgacgctgtgtattttcaacaaacaggcagtttagtggttgctcatcagcaagataggggcgatttacaaagttttgtgagtcgcttaaaaccgcttgaaagctatcaggcacaggcattggttggcactcaaatcgctgaccttgagccagaactagctgggcgtttccatcaaggagtgtatttaccttgtgaagggcaactcgataatcaggcattttatggcgctagttttaaaaagcttacctcgcaaggagtgcaatttaactttggctgtaaagttgaattgaacgcccatcaggtaaatggccaaagctttgactatgtatttgattgccgaggcttaggtgctaaacaggctgaacctttactgcgtggagtaagaggagaggtggcgcgtttatatgcaccagaggtgaacctaactagaccgatacgactgatgcatccgcgttacccaatttatattgctcctaagccaaatcatcaatttgtgattggtgcgactgaaatcgaatcgcaagacacaggtaaagtcaccgtgcgctcggcactggagttattgtctgctgcttatacggtgcatagcggctttgctgaagggcgtatcgagagcttgcaatcagggcttcgtccagcgtttgcagacaaccgcccgaaagtcacaaaacaaggtcgagtgatcagtattaatggcttgtatcgtcatggttatttacttgcgcctcaggtggtcgatgatgcagtgagcttaattgcttaaggataaaaatgaatattttaattaatggtcagacagttacagtgaacgacaatacatcgctgactcaggcgttgagccagtttggcgcaagaccgccatttgcggttgccgttaatggtgactttgtaccgcgcagccagtgcgatgctaaaaccctcaacgaaggcgacagcattgagctattgtcgccaattcaaggaggctaagatggatagtttttcggtttatggtgagcaatttacgagtcgtttactgattggctctgcactgtacccttcgccaagtgttatgactgagtcgatagtggcctcacaggctgaaattgtcaccgtttcattgagacgtcagcaaagcgcttctgcgggtgatgatttttggcaattgataaaaaataccgggttaaaggtgctgccaaatacggcgggttgtcatagcgtgaaagaagcggtgaccttggcgcaaatgtgccgcgaagtatttgccactgattggatcaagttagaactaattggtgatgaatataatttacagcccgatccaatcgcactgctcgaagccactaaaattttattagccgatggctttaaagttttaccttattgcactgatgatttagtactgtgtcagcgcctcgctgatttaggttgtgaagtacttatgccttggggcgcaccgattggcacaggtaaaggcttgctgaatccttacaacttaaaaatgatccgtgagcgcttgccaaaccatactttaattgttgatgcgggcttaggtttaccatcccatgcctgccaagcgctagaattagggtatgatgccgtattattaaattcggcaattgcaggtgcaggttgccctgtgacgatgagtaaagcgtttaagagtgcggttgaagcggggcgatatagctatttggccaaagcgatgccagagaaagacgtggcaagcccgtcaacgccgacactcggtatgccattttggcatcaagaataaaatgtgaggagtaacatgaatcaggttgtatggaccatagctggctcagattcgggcagcggtgcaggaattcaagccgatatcaaggcaatgcaaagttttaatgtacatggctgtacggttattactgctttaacggcacaaaatagtttaggtgtagaagcgctgaacccgatatcaacagaagtgattgagtcgcaactattagccttagccagtgatatgcctgccagcgtgattaaaattggcatgcttgccaatgtgcagcaaatacagcttattagtgagcatttaaaacattacaaagcaacttgggcagagccgcctttggttgtttatgatccggttgccattgcctcaagtggtgatttattaacagaagaagatactgttagtgctatcaaagagtgtttaatgccattagtcgatgtagtaacaccgaacactcacgaaacacagcttttaaccggtgtttacctgattggcccaagcgcagtgaaagaagccgcagagaagttaacaggctatggtgcaaaagcggtgatcatcaaagggggtcattgggattacccaagtggctactgcattgattactgcgtgcaaggtgagcaggcatattggcttggcaacgaaaaaattcaaacaccgcatagtcacggtactggatgcagtatggcctctgtgattgctgcgtgtttagccaaacagtatccactcaaagatgcctttattttagcgaaagcctatataaaccaaggattaaaagcagccattcgatatggtgaagggattggccctgttgcacacacttgctttccaacaaatctagctgattacccacaagtcatcgaagcgggaagttggctaggtgatgaactcgactttgactgcccggttgattttaccatggcagcaggctttgctgagtgcgactctaaacagcttgggctatatgccgttgttgatacggttgattggttagagaagtgtttagctgaaggagttaaaaccgttcaattaagaatgaaaaatgcagacgatgcaacactcgaagatgccattgcaagtgcagttatgctggggcaaaagtacgatgcgcaggtgtatatcaatgattattggcaattagcgattaaacatggcgcttatggtgtgcatttagggcaagaagacttacaaaccgctaatttaattgccataaaagaggctgggctacgcttaggtgtttcgactcatggcttttacgaaatgctacgcgcgcacaattacagaccaagttatatggcgtttggcgctatttatccaaccaccaccaaagacatgacagggcaaattcaaggtttagaaaagctcgaaaaatttgtaccgctaatggccgattatccaacggtcgcgattggtggaattgatatatcacgtgcagagcaagttgcgagtacgggggttggcagtgttgcagtagtacgtgcgattactgaagccgaagactaccaagcagccattgccaagttaaaacagctggtcgaaggtcagtcttagcatgagcgcgttaagcgacaaagagcaaattcgttatagccgccacttgctattaaaagaggtggggcatgcggggcagcaaaagttaaagtctgcacatattgtggttgtcggggcaggtgggcttggctctccagcactgttttatttagcggcagccggaatcggaacgctcactttaatagacgatgataaggttgagctttcaaatctacagcgacaaatactttataaagtaaaccatatggggcaggcaaaaacacaggcggctgccaaggtattaagcagtttaaataatcaaattacggttaagcccctatgccaaaagcttgatgaaagtaactgtgctgagcttcttgatggcgctgacatcatccttgattgcagtgataactttgctacccgttatttggttaatcgctattgtttagctaaatctatccctcttgtgtcagctgctgccattgcaacacaggggcaagtgatgagttttgattttcgtgatgaacatagcccttgttatggttgtgtattcccgcaaacggaggagcaaacagcgcttaattgcgataatgctggggtattgagcccgttactgggggttatgggcagcatgcaaagcttattggctatcaatatattgcttggccataaagtcggtagtgagtttattcaatttgatgggctaacactaaaacagcagcgatttaatattcaaaaagatagtgaatgtttagagtgtaatcgtggggtataggcgcggttttatagtgaattttaagcaaaccactttagctaaagtggtttgcttaattgaacttattagtcgttaattttcgcaaatggtgtgcccatacgtgttactgtctctgggtgttgatctgataagaactcagcttgatttgcaccccaggctaaaataaccgtagagcctaatttaaagcgacccatttcttcacccttcttcagggtaattgcattgtcacctttcgttgggtaattccaactaaatacatctttacccgctggtggcgttactgtgcctgcccaaatagtctcgatgctagcaacaattgtcgcacctacaagcaccatggctagcgggccaatctcggtttcgaagatagccacaactcgctcgttacgagcaaataggttaggtacattttgcgctgttaacgggtttacagaaaataaatcacccggtacgtagatcattttgctcagcgtaccatcaacaggcatgtgaatacggtggtaatctttaggcgctaaataaatagtcgcaaacttaccgcctaaaaacggcgctgtgtcttcttctttgccaccaagtagtgcttgtaagctgtagtcgtggccttttgcttggatgatttgaccgtctactacatcgcctaattggctaattgcaccatcaactgggtgagcaataatgtcgctttcttcggcaagtggacgaattccttcttttaatgggcgagtgaaaaactcattaaaagttttgtaatgagctggatctgggtatttagcctcactcatatcaattttgtattgtttgataaacaatttaattaaggccgttgttaagccacccgcttttgctgctgccaacttgccaaccatgcgcgaaatgaaatgttttggcatggcatattgcatagcaattttgaatttatctaaactcacttgttatttcctaaatagttatacgcgaggagcgcgtgcaccagcacggccgtcggccatagtttctaaaattcggtggtaactgtcaaaacgaagttctgaaatttcaccatcatcaacagcttggcgaattatacagccaggatcgtttaaatgcttacaatctcgaaaacgacagccaccaataaaatcacggaactctttaaagcaccatgtaacgcgctcaacatctaaatgccacaagccaaactcacgaattcctggtgagtcgataaggttaccgccacttggtaagtggtgtaatcgcgatacggttgttgtgtgctgaccaaggccgctgttctcggagacttcttgggttagaatgtcagcatctggcagtacagtgttcactaaggttgatttacccacaccactttgaccaacaaaaatgctgtttttaccgaccagtttttgtttaagttcatcaatgccttgacccgttttattactgactaacagtacttgataacctaactctcgatagatatcgagaatttcatcaataaaagcaaggccttcatcgtcaattaaatctattttgttgagcactaaaataggctcaattcccatgtcttcacaggcaactaaatagcgatcgataatgtttggcgtaaactcaggcagtaccgcagagaccattaaaatttggtcgatattggcagcgacgacttttaccccgtcataaaaatcagggcgcgttagttgtgagcgacgttcatgagttgcctcaataacgccagctaagtcgccttcgctaacttttgcacggcgaaaaataacttcatcaccacagacaaggctcgatactgttctgcgaatattacaacgtaatatgctgcctgattcggtttcgatgtcggcatgttggccaaatcgactgatcactaccgcattttcggcaggacctaaattgtcattttgccattgcacagttgcccctttctcttgctttttatctgcattagagaggcgtttttgatggttggccttaattcgacgcgattggcctttacttaatttcttttgttttgccacttttggcctataacttgagtaaatgtcgggctttttgaaaaaaaagctttaggtcgactgatgatactaatatgatatatctaaatgcgttggatctaaaggaaagcaccgctaaggtaactatgtcttttcataaatcaaatcttatctggctcgacctggaaatgaccggcctcgaaccagcaacagataaaatactcgaaattgccactgttgtcaccgacagtgatttaaacattttggctgaaggccctgttattgctattcatcaaagcgatgaactgcttgatggcatggatgagtggtgtacaactcagcacggtcaatctggtttaacagctcgctgtaaagcaagcacattcacagagcaagatgccattgagcaaacactggcatttttgaagcaatgggtacctgcgggtgcttcgcctatgtgtggtaattctatcggccaagatcgccgctttatgaataagtacatgcctgaattggaagactactttcactaccgtaacctcgatgtaagcacagttaaagagcttgcgcgtcgctggaaacctgacgtgttagcacaagtgaacaaaaaaggttcgcatctagccctcgacgatatcaaagattcgatcatggaattaaaggtttaccaagaaaaattctttaatttgtaaaaaacatttgcaaacacatcggattattgtagaatcctgccccgcttaagacgttaacccccgcggggttggtatgtctctaagtaattgaatgcggcactagctcagttggtagagcgcaaccttgccaaggttgaggtcacgagttcgagcctcgtgtgccgctccaatttctcaccaaaagaaattggcttaagtttcaaggggaaagttgaaagcattagcttgaagctagaaacttgcagcttacaacttatttatgcggcactagctcagttgccagaacgttttaccgcaaccttcaaggttgtgcaccaacggacaaattactgactacttttgaatgcggcactagctcagttgccagaacgttttaccgcaaccttcaaggttgtgcaccaacggacaaattactgactacttataaagcggcactagctcagttggtagagcgcaaccttgccaaggttgaggtcacgagttcgagcctcgtgtgccgctccaatttctcaccaaaagaaattggcttaagtttcaaggggaaagttgaaagctccaagctattcaaacttgaatcttgtaactagaaactatttgatgcggcactagctcagttggtagagtgcaaccttgccaaggttgaggtcacgagttcgagcctcgtgtgccgctccaatttctcaccaaaagaaattgatataagtttcaaggggaaagttgaaagctccaagatattcaaacttgtaacttgaatcttgtaactagaaactatttaaagcggcactagctcagttggtagagcgcaaccttgccaaggttgaggtcacgagttcgagcctcgtgtgccgctccaatctctaaaaaatcccaaaatactttcttaaataaaatctttcttaaataaagctgttaaaaaccaaactttgtctatagctagtttttagatctgaccttgaatcgtcgcgacaatgcgtctagcaccaccatggtctcggtgttcacctaaataaataccttgccatgtgcctagcattaatcggccttgattaattggtatggtgagttcagcacctaatgtactgctttttatatgggctggcatatcgtcatcaccttcataatcatgacgataataactttgtcgttctggcacaaagtgattgaagtgactttccatatccattcgcacagtcggatctgcattttcgttaatggttaagcttgctgaggtgtgctgaatgaagaggtgtaataaaccgactttgtactgtgttatctcggggagttgacgaagtatttcgtcatcaataatgtgaaagcctcgcgagcgaggctttaattgaattgttttttgctgccaactcatagtttatcaaagcttacttcgatattggcgttaccgtcagctgacgtgaatggaattaacaccttggcaccttcgcatttgtgagcaattgtatgtcctttgccagacactacaactggtgttgccatatcaaactcatagcctttttcgccaagtaagtttttagcaccacctgtcaccatgttagtgatttcaccgaccatatcggtaacttcttcatcgatagtttctggtcgttctccgagcattctttccataatggttaatgctaggctttcatcaaatgagattgaaagtgagccttttgtttgtggtccaaccatacctattaaaccggaaacatcaccacgggctacttcatctttttttaaactaggtttacccggtttcaattctgtttgagccatggtgctcaatacatttaataatgatgataaaaatgggttgatgaactccacattcattatttaatttccctcaggttacgcagccaagctgcaattataacttaagtgtagtggctgttctgaacagtgcacttaatctttgcaattttcacactttccatgtgcttcgatagtttgtccagagacaataaatccactttctgcggcgagattattcagttcgtgagaaatcactgttgaatgtaactctttaacaaaaccacagctgtcgcaaattaatagttgtacagggtgaatatgatcgaaatgatggcacaacataaaagagttagtactttcgattttatgaataaagccaagttcagacaaaaaatctaacgcgcgataaatagtggcaggttttgcaccagactcagttaatttaagttgttctaataagtcataagcacctacaccaccttgcgcactagctaaaaggcgaaatactttttcacggataggcgtgaaacgtgcaccacgattgtcgcagacttgttttgctttactaacgagtgattctatattcatcttctcttatccttacgctaccgtgatatactaacatactgtattgtagttgcagtgtttttattcgctatctcgttttcaaggaagtttgttaatgactgagttgctcgccgcgttcattttcttttttgctgtgattgatccaatcggtacggtgcctgtctttattgctgtaacccgctgggatgatgccaagtttaaacgcaaagttgcacttaaagcggtaggagtgtcggcattagttttacttttctttgttattgctggggagttgctgttaaacgcaattaaaattcctttatcggcatttcagattgctggcggcattgttctattactttttgcgctgtctatgatctttggcgagagtaagcctgaaagcgaaattaaaagtgtccgtgatagtaccgaaacggcaatctttccgctggcaattccatctattgcaagcccgggggcaatgctcggtgcagtgttgatgacacgcaataatgaatacacatggttagagcaactagttacctctgcgataatgttatcggtgctcattatcgtcttagtgttacttttattggctactcaagttcacaaattaattggtgatagtggtgccagtataatcagccgagtgatgggactaattttatcttcagtggctgtgacgaacattcttggcggcatagctcactactttggtttgagtgtcgttggataagatgaattaaagtgcattttcagtaatttaaactttgaatatttgtcttcttttatctaagttaagaagtaggcaataaaaatttaaggaatagagaatgctactcaaaaatgttgttttatcagtttttctgatttttagtttaggtgcttgcatggagccaacctatgacagtggtaagttaaaagttattgaagtaactgatcatgattttaaaattaatggtgaaagcgcagtaacagtgatcattggtcatgcaaatgttgctgagtacagcttttcacttcgtaaaagtgatttaaagaaaggtacacttttacaatctgtgtctgacagcaacccgaatgttcgcgctgatggtacattttttagtgaatactatgtgcagtcaaaagatcatgatactcatgcatcaattgaaattgttgaaatcgaccctgttgaaaaagtagcgcgtattgcagtgggtgccaaactagttaaccttaagaacgaagattataaagagttagaaatcaccatatttgaacttacaggcaaaaacttagaacacctccttaatgaagttaaaagttaatttatccaccattttgtaagaagtgagtgtgtagtccacttcttttattcttttcttccccatctttgattatgtcatgttgcgattgagcattagtgatataatatcgaaaattttgtcagggcatgatgcatctcttaaaattgcgtcatcgctgtactgagcgttaatcgtattaggtaatcaagttgcaagtaaacgtattgatctttaaaggggccatgttatgagcacaacgacattaaaccgccgtttttccgtggcacccatgttagattggacagatcgtcactgtcgaacttttcaccgtaaaatgactaagcatgctgtgctttacactgagatggtgacaacaggggctattttatttggtaaaggcgactaccttcattttaaccagcatgaagggcctgtggcattgcagcttggtggctcagatccagaagcgttggctaagtgtgcaaagttagcggcagagcgtggctatgatgaggttaaccttaatgttggttgtccttctgaccgtgtgcaaaatggtcgttttggtgcttgtttaatggcagagccgaagctggttgctgactgtgttgcagcaatgaaggccgaagtgactattcccgttacagttaaaacgcgcattggtattgatgagcaagactcgtatgagtttttatgtgccttaattgaagcaagtcatgatgttggttgtgatgactttattatccatgcccgtaaagcatggttaaatggtttaagcccaaaagaaaatcgtgagatcccaccacttgattacccgcgtgtttatcagttgaaaaaagattatccgcaacttcacttaagtttaaatggtggcgtgaaaaccattgctgatagtgtggctcaccttgagtatgttgatggcattatgattggtcgtgaagcgtatagtaatccgtttattttgtctgaggttgatgaaaacatttatggtgatgaagcctttacgcttactcgtcatcaggttgttcgctctatgtatgactatatcgaagatgaaatgagtaaaggtgctaacttttggcatattgctcgccacatgttggggattttccaaggccaacctggcgcgcgtggtttcagacgtcacctttcagaaaagggtcatggtaaagcggctgatttatctgttatggataaagccttaagttttgtcccagaagcctaatcatttccctcattaaaaaagccacattttgtggctttttttgatcctaaaatttggtgaaaaagttaattttttagtcaaattagttatttttcattcagtcaccagtcagtctaattcttgatttttaaatctcaacttattgtatttaaatagttatttttatttttgtggtagttggcacaagaattggaatctccttgatgtattaacccaataatcaacaggagagtcacatgggtgtattaaatcgcgtaaatgacattattcaggcaaacctttcagctgcattagacaaagcagaagatcctgaaaagctactgaacttacttgtgcaagaaatgcaggatgcattgagtgagtgtcgtgcaactgcagccacgtttctaacgcaagaaaagcaaatgaagcgtgaaattgccgctaaacaagcaaaagtagctgactggcaagcgaaggcagaaaaagcactgagtaaagatcgtgacgatcttgccaaagcagcattagttgaaaaacagcgtttaactacagaaatcgaagcgcaacaagctgaaatgaataaagtggctgagtcactagcaaagctcactgaagattgtcagcgtttacaaaataagcttgcagatgcaaaagcaaagcaactgacttatatgcaaaaagagcgcgttgttacagcacgtttaaaagtaaaagagcagctgcatagcagtaaagttgaagatgcattagcgcgttttgactacttagagcaacgcgttgaaaatattgaatcgcaggttgaagcgtatgaacttacgcaaagtgatgcggcaaattcaacagcagcacaaattgcagcgcttgagaaaaatgacgcgattgataaagaacttgctgatttaaaagcaagtatgaagcaatctgcttaggagtttagtgatgaatacatatcatacatcaacacgttggtaccgagatctaagtaacaagaagatctctggtgtgtgtagtggcttagctgcacgattaggctttccggtatggtctacacgtttagttatgatcatactacttattcaaatgccgttgttaataggcttgggttatttagtggctcattgcactttaccagttaaaggttactaggagtcttttatgaaaacgttagctatcatcatcttagcaatgttattactgtgcacagatacaatttcgtttgtatcgtttgatacatggcagttgcctttgtcgattgcagatatgagctgggctgggcttgaagtgcttggtgctatcatcgcagtaattgccgttgtggctggggttgctttatttactattggcttaattggcgcaggtgttgttgctgtgattggcgtagtgcttgcgtttttatttggctcagttgtaattgcatggccgttattgttaatcgccgcgctgtgttggctggttgccgataacaaaaaatcagtggcttaagctgtgaataaactgccttaatagccaaagtatgctaaatttagcgggtaagtagatgtcttaacaaggattaaaacataatgaagttgttacccgcactgtctttttttactgcaagtttattatttagtacgtttacatctgcccacagcggtcatgagcacagcgaggttgcagaagttaccgtgagtgacgcccaagttcgagaattcttacccgctagtaaagcgactgttgcttatcttactattaccaatccaagtgatcacgccacagtgcttactaaagccgaactggatggtttaggccgcgttgagattcatcagcatactcatgttgatggcatgatgaaaatgcaacaggttctttcactggaaattagcgcgcatagtcaggtggaatttaaacctggcggttatcatttaatggtttttgaaccagaggatgaactaaaagcagggcaagagcgtaaactcacgctatattttaaaaacggcaaccgagtttttactcaagctaaggttgtgtctttacaagaaatgtctgaacaggctgcaaataagagtgaacaacactcacaccactaggaggtaccatgtctgagcataaaggaaaaatagccagcgcattacttatcattttaattattttctatgcaattgcggtttactggagtagtgaaccagatcgcatggatgttgtaaacaaggcaaaacaagaagcccaacaacggggtgaaaagtttgtcactggttacacaaccacgtcaacactcattaatgttgcaagtacattgttaaataaaccgggtggctatttatcaaatgatattatgccaccaagtgtgatgatggataatatgccggcatgggaatacggggcgcttgagatgactcgagacctggtattgtcgatgcgtaaagactttagtcgttcgcaatcacagtcgaccgaacatgaggctctgaaaaaagcacagccgcaatttaatataagttcagtagcatgggcatggccaagtgctgaagctgaatatcaaaaaggcattgatttactgattgtatatcgaactcaaattgcggatcaaaatgatcgcgatagccagttttatgcccgtgcagataatctacgtggttggttaaaagaagctgaaaaacgcctaggcagtttaagccaacgcttaagtgccagtgtcggccaagaacgcttaaacacagatctagccggtgataccgcagcccatcaagcaacctatacgcctttacagaatcaggtaaaaacatcgtggtggcaaattgatgatgttttttatgagtctcgtggtgcaacatgggcgttgctgcattttttacaggcagttgaatatgattttgccgatgtcttagaaaagaaaaatgcgcgtgttagcctgcaacagattattcgtgaattagaggccacacaagaaaccgtgtggagtccaatgatattaaatggtagtggttttggctttgtagccaatcattcattagtaatggcgaattatatttctcgagccaatgcggctctaattgaacttagcgaacttttagcgcaaggataaaatgatgaaaaagtactgtttagcggccgctttatcgatggcctgtttagctccgacagcgcaagctgacacattattaggtttatatcttggtgttgatggctggcaatcagataacagcggtagttttgcccaagacggtaatctacaaagcttcaaatttgatgatgagacgtttacgagctactacgcagcactagagcacccagtaccacttgtaccaaatattaaacttaagtacacagagcttgaattaaacggttcaaccatgcttgatgaaagctttagctttggcgattctaactacgtggttggtacaaccgttggtacggtaagtgatttgtcacatgttgattatattctttactatgagatttttgataacgatttagtgtctatcgatttaggtgtcaatgctaaacagtttgatggtgagattacggtaacgggtacatcgcaaaacggtggaccaagcactactgagcgtgttgatttttcaggctttgtaccattagtgtatggccgtgctgaagttggcttaccattaactggcttgagtgttttctttgaaggtagcttactggctattgatgatagtaaggttcaagattatcaagccggtattgcttatgcgttacttgataaccttgctattgatatggatattaaagcgggctatcgttcaatgacgctagagcttgatgatatcgatgatatttacacagatattgatgcttctgggccatttgcaggtattcaaattcacttctaaatagatggtgaatctattattagctggcaggctattttaatgcatgccagctaacgtcaaactcatcttctaaggatgttgataaaatatttttataagctttatttatcggtgtactaatgagttttttaagctcatcaccggtttgagtaaacttatagtaactaagcaccaaatcattacttttagcttttaatacaaggcgctgattcataaaactaagggctaactcttgtcctgcttttaatactgctgattcaatttcttttcgatacaacaagttaatatccattaaagtcaaaatgtcaggaaaactaaccggggttttgcccaagttaaatgacactttgttgccttttcttaacaaatcaaaaagcgacggctttttgtaaaagcccaagagaattaagtgactgtggtctttttcgttaaatccacacagcgaggtgcagcgctgtaatgcatcggcttcacgctgagtcataaatttaagcgtttgtaagcttttgattgaaaatgtacctggagcaacagtttcacctgccaatatttttgcccacagtttttgcattgcagtatttgcagtatcttcgcataagctaataaagcgctctatccaatcgaaatcgggtcgttgttgaccagttacatcggggcaaaacgccatcgccattgccataatggtttcgatattttcttggcgctttattaattggatttcttggcgtgtatgggctctgtcgagtaatgttgcttcagcttttacttgatagggtagctgttgttgtccttgcggcgagtattgttcatcgtttgtttgattgatttttacagacgatgttttatggatagggtatccaagctggttttcgattatgttagcaagattaattctcgcttgagccgctttgactgtcatcggtagcaattgccttttctgttgttgctaactgcgcataggtttttatattgttcaaagccaacttaaccgagttactaagtatatattggcttaataaagcgaggtagccgccaataataggagtgttgacttcaccttgtaatgtgcatctaacctcaacgccatcagaggcatttgaaaaacgtatctcgccttttgcaatgtgctcttggttaaacaaaatattaaacatcattgcatttttatttagttgggtaatggtcatctcgcctttgccaaagcgactttgccaaaactgatgagcgccaacgccttggcttggctctgcaattataaattcaatacttgggtcaactgcttgccaaggttgccactcaggccattggttaaaatcactaaccaagcctgcgatttcttcggcgcttgctgatattcttatcgacttatcaacagtgtattgttgagaaagcattaaacccaccacaagcgcgatgagtgtcataacaaataatgcttttaaactcacaaagaataatttaataatctcacctcaggcaatagttttatatctttcataacattatacgtatcttaggctataatctttttgatacgactgtatatgttatcactaatgtaccacagtcgaataagtgatagaatttttatgcatcgttgtaaagtggagagtcaccatcgatacagttttacggtgttcactttaaggaattattaatgacatcagacagtaatgactttttatttaacgaccaagatgatgagcagcttctcgaagaaactgtatctgatttttgggatgtattaatagtcgatgatgatcctgaaatacattctgtcactaagctagctttatctggggttgagttttgggataaaggcttgcgattccatcacgcctactctggtgcagaagcgctcgaattacttaaaaaagaccattctatttccgttattttacttgatgttgtgatggagtcagatgatgctggtttacaagttgtgaagcaggtcagagaatgcctaaaaaatcataatattcgtattattcttcgtactggtcagccagggtatgcccctgaagaaaaagtaatccgcgagtacgatattaatgattacaaaactaaaactgagctgactcgtagtaaattgattacttcactggtaacagctatccgttcttatgaacaagtttgccagctcgaatttcaaagccgcgcattgaacaatattctactcgcctcgaaggctattttaggctttaccgatatcaaagcttttaccatggctgtattaaagcagctttcgtttattttagattgtgagcctcacggcttactgtgtggttcgattgaagatgacgatcgggtttttgttttgggcggtggcgctgaatacaacgatgtaattggtcagcgaattgagcagcttgataatggtcgtatcattttacaagtgaaaaactgcttagcacaaggtgagcatcaacatactgagcttgacagtacctatctactaaaaagtaaaaatcgccaagccgcgatttacttagaaactaatcaaacgccaagcccgtcgcagttacaatttgccgagatctttttaaccaatgtaagtgttggtcttgataatgtgcgcttgtttaaccgtttatgtgatgcagcgtataaagatattttaacaggtcttcctaatcgtaatgattttatcaacaaagtagagcgcttttatcagcccggtaaaacagactatgtttttttattgattgatgttgcccatttctctgatatcaataatggtttagggcaagaaattggtaatttgcttttaaatgccattgttgaaaggctgcaacaagagtatccagaagccgagctactttctcgaataggtgctgatgtgtttggtttgatattaccaaaacagcgttatgaccttgagcagttacgcgaacatcttagtttaccttttactgctggcgaacatattttacctatcaattttaagattggcttgtgccttcaaggtgactttcagaaagcgggtattgaaacactaaaattggcatatatagctttaaaccaagctaaaaagagttcctctgaaatggtcgtcacgtatactccagaaatggaagagcagatggcatggcgcttagggattattaggcagcttcgtcaagactttgaacaacgtaaacttgaagtgtggttccagccgcaactagatttgaatacattagagatcattggctgtgaagcattgctacgttggccgtcagggaatggccaatatatttccccagctatatttgttcccttggctgaagatgcaggtttaattgttggaatagggcagtgggtactagaacaagcatgtttacaacaaaagcgtcttgaacagcttggctttaacattagtgttgctgtaaacgtttcagtgccacagtttaaagtgaaaggttatgcgcagcaggttaaagacactctaataaaatatgaagttaagccacagtttatagagcttgaagtaaccgaaagtgtggtaatggatgagctgagcaatgttattaccactcttgaggagttaaaagcatttggcattgaaattgcgattgatgactttggtacaggcttctcatcgttgagttatttgcaaaaactgccgttagatagactcaaaatcgacagagcatttataaaagacctaccaggtaaggggtgtgaggcaatcgctgcgttaattatttctttgggtgcaagattaggtctaaaaacaattgcagagggtgttgaaacacaagcacaagccgattatttacttgagcttggttgtgatgaagtacaaggatttatgtacgctaagcctatgcctgagaacgagttaatcacatatttacaagccaaacattaattagcttagctcttgaccctagttacttgcagcgcccttcaatgtgaagggcgttttgttttctataataatccataagagtggggtataattcgccccttttgttagcagagtacactttatgagcgcattaaaagccgagcgaggcctgttttcttaccctaagtattgggctgaatgctatggcacggcgccatttttaccaaccacccgtgcagaaatggatgcattaggctgggatagttgcgatgtgattatcgtcagtggcgatgcctatgttgatcacccaagttttggtatggctgtaattggccgcatgcttgagtcgcagggttttcgtgttggtattattgctcagcctgattggaactcaaaagatgcctttatggcgttaggtaagcctaacttattttttggtgtgactgcgggcaatatggactcgatgatcaaccgctatactgctgaaaagcgtatgcgccatgatgatgcatacacgccgggtaacataggtggtaaacgtcctgatcgtgctgtggttgtgtatagccaacgctgtcgtgaagcttataaagatgtgccgttaattattggtggtattgaggcgagtttacgtcgtattgcgcactatgattactggcaagaaaaagtacgccgaagtgttttgtttgatgccaaagcagacattctaatttacggtaatgccgagcgtccgcttgttgaagttgcgcaccgaattgctggtggtgagtcggttgataccattcaagatattcgtggtaccgcggttattcgaaaagagcctttgccgggctggcgtggcagtgactctacggctatcgataaaatcggtaagattgatccaattccaaacccgtatggtgcagatgatgtcggttgtagtaagtctgagtttaaacaagcgggtattgatttaagcgcagaggctgccaagccaatcactattcagcctgcgcgtcctaagccatgggaaaagacctacgttaagttaccagcgtatgagcaagtgagtgtaaataaaccgctttatgcccatgcgtcgcgtattttgcaccaagaaacaaacccaggttgtgcacgtgccttgtttcaacgccatggcgaccgttcgatttgggtgaacccgcctgcatttccgcttgaaactgaagaaatggatggcgtatttggtttgccatatcagcgtattccgcatccaagctatggcgatgaaaaaattcctgcctatgaaatgattaaaacctcggtgaacattatgcgcgggtgctttggtggttgttctttctgttcgattacagaacatgaaggacgcattattcaaagccgttcagagcaatcaattattgatgaaattgagcaaattcgtgacaaagtgccgggcttcacaggggtaatttctgacttaggtggcccaacagcgaatatgtataaattgcgctgtaagagcaaaaaggccgagagcacgtgccgacgtttatcatgtgtttatcctgatatctgtaagcatatggacaccgatcacaccccaacgattgagctttataaaaaagcccgtgatgtgaaaggcgtgaagaaaatcttgattgcgtcaggcgtacgctatgacttagcagtagaggatccacgctatgtaaaagagctggttactcatcacgtaggcgggtacttaaaaattgcccctgagcatactgaggatggcccattatctaagatgatgaagccgggcatgggtgcttacgataagtttaaagagctatttgataaatactcaaaagaagccggtaagaaacagtatttgatcccgtattttatttctgcacatccaggaacgaaagacgaagacatggttaacatggcgctatggttaaaggccaatgactttaagcttgatcaggtacaaaatttttacccgtcgccaatggccaatgcaacgacaatttatcataccgagatgaactcgttacgtaatattaaaaacaatactgaacaagtgcctgtgccaaaaggggcacgtcagcgtcgcttgcataaagctattttacgttatcatgatcctgccggctggccgatgatccgcgaagctcttagaaaaatgggcaaagcgaatctaatcgggaaagggccaaactgtttggtgcctgaagagagtcgcaacgaaaaagcggcaaatagtaaaggtggtaaaggccgtgcggcacttacacgccacactggttttagccaattcaaaaaggccaataccaagcctagagtaggtaaaaataagcagcgcgcaaagtaaaagatataaatggcccttaaagggccgtttttattttagatcaataaccaagttgcggtgcctaaaaaggcaaaaataccaacaatatcggtgacggttgtcagtaccacactgccggcgagtgctgggtcaattttcattttcttaagaattaacggaatactcgcacccgcgataccagcggcaacaagattcataaacatcgcaaatgctaagaccgcaccgagcttaaagtcccattgccatagggcaaccacaccggcaattaatatcgaccaaataacgccattcagtgcgcctatcgccagctccttaagtaataagaagcgttggtttgtttggttgatatggccaaccgctataccacgaataaccagtgttaatgtttggctacctgcaacaccacccattgaaggtacgataccatttagtaccgccaaaataggcaagattgctaaggtgttttcaaaaaagcttgccacaattgctgctagcaatgcggttaataagttaactcccagccaaatagagcgacgctgcgaacttttgagtactggcgcaaaggtatcttcttcgtcgtcaagaccagcaaggcttaacatgctgtgttcagcatcttcacggatgacgtcaacgatatcatcgatggtaatacgaccaagcaagtgagcgttatcatcaacaacaggggctgaaatccagttatgacgctcgaacaattgcgctacatcactttcatccattgagatcaggattgactcgcactcttcatccattaaatcacgaacaattttatccgatgagttggtcagtaatgtggttaacgaaagcgcgcctaaaaagcagttatgtttatcaacaacgtataagtcatctgtaccctctggtagttcaccacgcaagcgtaaatagcgcaggactacatctaaggtaacatctggacggattgttaccgtatcgctgttcatcagggcaccggctgaacgctcttggtacgacagtgcctgagttgccctttctctatcttgcgagtccattgcactgactacgtcttgataaacggtgtcaggaaggctacgaagaacttcacctaagtcatcgtcgtccatgtcttcggttgcagcagcaatgtgctcaggctccatctgagcaataatacctaaacgtacgtcttcagagagttcttctaaaacatcaccacgcacatctgggtctaccaactgccatagcatgcgacgaattttatggggagatgactctaataataaagcggtatcacacggagctgttttagcgagcatgcctcgcacctgaacaaattgtccactattgagtgacttggtcacttgtttaagttgttgtagtgggtagtcttgttcaaaggcttctggcattggcgtccttacaactgaaaatagattaataaagattctgcaaatacagcatagttgctaagtggtgtatttgcaggatatcttcacactgcgataaaattattaagtgctttgtattattaaggtgtgaacgatataaaagtaggatatttaaagagaattataaatacctgaactaagtttaacttaaacggttaagccttagcaaacgctattcttgttcatgaaagcgttgtgcaattaattctccaattgcgttcagtgcagcctctgcatctgggccttcacataccacacgcacttctttaccttggctactttcaagtagcattaaggctaaaacactatcaccttcagcttctttatcgtcttgataaagcataattttagcatcaaattgcaaagcaagttgtgctaaaacagtggctgctcgtgcgtgcaagccaagcttattttgaattaaaaacgtgtcttctgcgtgcatctggcatccaattaaatatcttgctcgcgatggcggatttttacgttcgcatgcgtttttgaaaagctatcaccaatggtctgcgctaaatataccgagcgatgttgcccgccagtacagccaattgcgatggtaagatagctgcgattgttacgctcaaggtgaggcaaccatgtttgcacaaatgtttgaatttgccatgtaaatttttgcactatgctatgacttgcaaggtaatcttttactggttgatctaagcctgtgagtggctttaggtctggctcccagtgtggatttggtaaaaaacgtgcatcaaatacgtaatcggcttcttttggaataccatgtttaaagccaaacgacataaaggtgataatcagctttttatcttttttacctaagatcttttcacgaattgattcagctaactgatgaacactcaggtcggtggtatcaatcataaaatcagcgcgcgtgatcagtacatccagtaatactctttcttgcttaattgctaaatcgagtggcagcgagtcaatcgatagaggatgtaagcgtcgcgtttcagaaaagcgtttgatcagagtttggtcatcactgtctaaatagaacagtgttgggtttgcgaaacctggcaggtattcaagaatatcattaaactcttgctgctctttcggtaagttacgcacatctatgctgactgctattttgtcatagttgtctgaaacgctacgaacaagcgaaggtaataagttgactgggatattatcaacacagtagtaacccaagtcttcaagtacacgtaaagcgaccgatttacctgagcctgagcgaccgctgatgataattaattccatttatgcctctgctgatatgacctgaaacagttcgtggtctgttttagcgctacgtaactgtttacaaaactctttatcttttagtctatcagcaattgtcgataaggtctttaggtgaagttggctgtctccatctggtacgatgagtgcaacgaaaatatccacaggtcggttatcaattgcgtcaaaattgattggggattcactcactatgacaaatgcctgtggttgctctgcaccactcatgcggccatgtggaatagcaatgccacgaccaatacctgtactgcctaatttttctctattgagtaaggcatcaaggacgtcttgttgagataaatgaggaagctgctggtgagccagctcgctgatatattcaaggattctttttttgctattaaaaaggaccgcagctttgctgcagtcctggttagtaagtgaactaagtttcataatttagtgtcgagctaatttctctttgtgtttaatgacttgacgatctagtttgtcgattagcgagtcaatggctgcatacatatcttggtgtgcagttgaggcaaagagctcgcctccatttacatgtaaagttgcttctgctttttggcttaatttttctacatctagaatgacatgtacattattaatgtggtcaaaatgcctttctagttttgcaaacttgctgtttacatagtctcttaatgaatcagtgatttctacatgacgaccagttaaatttagttgcataagcattttccttctatgtaaaacgtctaaatcaaactcttacgctgattagacggaggtatcgctagagactctcgatattttgcaattgtgcgtctagctactttaattccttgctcagccaatatatctgcaattttactatcactcaatggtttagctgagttttctgcagcgataagctttttgatcaaagcgcgaattgctgttgatgaacactcaccaccgttttctgtgctgacatggcttgagaagaaatatttcaactcaaaaatcccgcgaggggtgtgcatgtatttttgtgttgtaacacgtgaaattgtcgattcatgcatttcgaccatttctgcgacatcgttcagcaccattggtttcatggcttctgggccatgttcaaaaaatgcttgttgttgctgtacgatacagttggttacttttaaaagtgtatcgttacggctctctaagcttttaataaaccatttagcttcttgtaaatgagagcgaataaactggctatcgctgctcgattttactgagcgtgacatagctgcatattggctattcactctaatttttggcatacaatctgggtttagttcaacgacccaacgacctttaacttttttaaccgatacatcgggtataacgtactcagactcttcgcgaactatgctgtctgctggcttagggtttaagctgtggatcagcgtcattacttcttttagttcgctttctttaagcttagtctttttcatcaaagtgcgatagtcgcgacttgctaataattcaatatgctcagataaaaccattttagtttcagctaaatacggcgtactggcatcgaattggcgaagctggatacataagcactcttgtaagctacgggcaccaatcccgactggatcaaacaactgtattctctttaagaccgcttcgacttcatctagttcgatttcttcttcatcattattttgattaaaactttcgactatgtcttcgcagctaacagttaaaatacctgagtcatcaattgcctctacgatggcgacagcgatcgcttcatcggttgggctaaatggtgtgagttgtaattgccacataaggtattcatggagggtttcagttgatgcaccctgataaattgactcatcttcaggcattggacctgatgatgttgatggggcagcactcatgtactcatcccatgtcacatccatggctaaatcgtcactaacggtgtctttgttaagggcatcgctgctttcttgttcgtactcactcggcgcttcttcggccgatgcacttagctgagtatcatcagattcagctttttgctcgttcttaccaatgttttcatcgttgtaatctgcttcttccacttcaagcagagggttactatcaagtgcttcttgaatttcttgctggagatccaatgtactaagctgcagcaagcgaattgcttgttgcagttgtggagtcattgtaagttgctggcccatgcgcagctgtaatgattgcctcatgtatccctaacaatccttttatgtgttatcgacacccgtgcagtcacaggtaaatttatatcgatttattgtcattgttatttagtttagcagatgcgctagatggtggcttattggttatagcctgaattgctcacctagatacacatcgcgtacggtttggtcagctaaaacatgctcaggtgttcctgatgcaattagctccccatgagaaacaatgtaggctttttcacaaacatcaagggtttctctaacattatggtcagtgattaatacaccaataccacgattttttaagtgttcaataattttctttatatctaacactgaaataggatcaacaccagcaaaaggctcatctaacaagataaatttagggtttgcggctaatgcccgagcaatttctacgcgacgacgctcgcccccagataaggccataccttgactatcacgaatatgctgaatactaaattcatcaagtaagttgttgagtgtttcttctcggccttgtttatttaaatctttacgcgtttctaaaatagccattaggttttgataaaccgttaactttctaaaaatagatgactcttgtggtaggtaaccaatccctaaacgtgctcggctatgcattggcaaaagtgtaatatcattatcatcaatgctgatcttgcctttatcgctaggtactaagccaacaatcatatagaaagtggtggttttgcctgcgccatttgggccaagcaaaccaacgatactgcccgcttcaacctcaagacccacatttttgacaacttggcgacctttataactttttgctaaaagctctgcttttaatgtgctcatggttggcctttatcgtcttgtttgttgtcaacaggcactaagattgtgtgtacacggtctgttgagttttcgtctttttctgcgctaattagttgttgtgccatatcataagtaatgcttttcgctgttactttttggcctgcttgagtcacttcggcttcgccatttaaagttaagaagcgcttggctacgtcgtagcgaacttcttctgcactggcgctcattaccgtgccatctgcttgcttttcttcaaaataagcaggcttacctgtggcgataattaactcaacagtaccttctgtatcaccaccatgggcttcaaggcgttcggctgtgatccggcggttgccatgtataatttcgacattgccttcaaatataccaacgccatcttttagcttaccagtttgacgatctgagcttatgctaatttgtgcgcctgtctgctcggcagctacgcctgaaaaggcaatcaataagcttgggatcaggagtaatttcttcagtttattggtcatagtatatggttcgtgtatggttagttaactctacaatctcggtttttaaattagcttttaggcctttaccggtaatttttaaatttggtcctgttagcgtcacaggttgcttcgaaaacatggtcatttgttctatatcaacgttaatgttttcagctttaatatcttcgatcatgccattatgggttaagtttttagcaacaacatcgccttcaaaaataagctgatcgttttcatataaggtggcttctttagcttttacttgccaaatttgctggtcgccataaagtgtaaaaataggttgctcaaaaaaggtaaacccaagctgctgataaagctccattttcgcagcggccactttatggctaatcttgccttgctcatcataagcggtttgctttagtgcaacggccgtataatcgggagttgcaataatctcgtcttcactatttattgtgtttgttgtttggttaaagtacggataccacaaccacaccatgcaacaaacaaaaacaatactcagtaaaatacgggctatattcatgcgctggttccatcgctagttaacggcttaccgttttctaacatcagtaaatctgttaattcacgtacagcgccaaagccacccggtagcatggtcgtatagtgagccagtttttttatcaatgggtgcgcatcattgactgctaccgcaaagcctactttttccattacaggcaaatcagggccatcgtcaccaatgtacgctatttgctcatcttctaggccaagtttatcttttaactcttggtatgcaatcagctttgtttcttggccttgataaatatgctgtacggttaggctagtcattcgctgctgaactatttgtgaatggcgcccggtaataacggcaacttcaaagccactattaatgagtgctttgatgccaaagccatctttggtattaaatgctttaagctcttcgccctgatttccaagataaattcggccatcagaaaaaacgccatcaatatcacatattagtaacttaactttttgagcacgctgacttacatcaggactaaggggctggtatagctcggcgaatgtcattacttacagaactcctgcttttaataggtcttgcatattaagcgcgccaatcggtgtgttatttttatcgattacaatcaagccgttgatacgtttgcgttccataatatttaacgcctcagcagccagcatctctgcactggctgtagtacatgagcgcgtcatgacctggctaatggcggtactatgaatatcaatacgttgctctaaaatacgacgtaaatcaccatccgtaaataagccgcagagtttttggtcttccgcgaccacggctgtcatacctaaccctttagcagacatttcaataagcgcatctttaatgctttgcgactcgtgcactattggtgttgcatcaccactgtgcattacatcgtttaatgtaagcaacaagcgcttacctaggctgcctccgggatgagataatgcaaagtcatcggctgtaaagccacgtgtttcgagtaaagcaacagccattgcatcacccataaccaaggttgctgtagtgcttgccgttggcgcaagacccagtgggcatgcttcttggctaactttaatgcaaacatgcacattagagagctttgccattgttgagtcagggttacctgttagcgaaatcatttttgcgccaattcgtttaataacaggaataatgcttaacacttcactggtttcgcccgaattcgaaatgcacattactacatcatctcgagtgatcatccctaggtcgccatggcttgcttcgccaggatgaacgaaaaatgccggtgtaccagtgcttgctaatgtggcagctattttattgccaatgtggccagacttacccatgcctataacgatgatacggcctgtgcattggtacattagctgacaagcttgctcgaaatgttcatcgatgtactgatctatttcgtgtaaagcttgcgcttcaatttcaagaacgcgcttaccttgcgcaataaaatttagctgggtcattgattatcctatttggctaaaaatatagccttgatatgcaataaatgcgactaacaaaaagccaccttctactctattgatgcgacgagcacctttaaagttcaatgacatggcaatcagcactaaagtagctgcaatcatgataagggcatcgcggttcgctgcagatgggtcgataatcgatgggttgattatcccagccagtggtaaaacagcgagtaggttgaaaatgttcgagcctacaatattacccaatgctaaatcatcttcgtttttcaataccccagcaatacatgcagccagttcaggtagactagtaccaatagcgataattgttaagccaattacaaggtctgaaaggccaaagtatttagcaatatcaacggctgattcgactaaaaaatgtgagctgataggtaaaagtatcataccgataacaagccataggatagctgatttagtactgacattatcgggaacatcttcacatgcctcgctcacgaaagggtcatcgtcttgatttttagcgcgtaaagacacaatcactaagcctgcgatgaagacaacaaaggcaagagctaatgcgataccttcggcaaacgaaaagtagttatctgaaaacacgtaccatgccgcaattgagacaagtagtactaaaggcatttctcgttttaaggtcattgacgagacagaaagagggcgaagtagtgctgttacgcccagtacaagtaagatattggtgatatttgagccaacagcattacctactgctgtatcagttttaccggcaagcgcggcagaagcagataccatcatttcaggggctgaagaacccatagcaacaaccgttaaacctatgattagggtcgggatccccatattttttgcgagtgcagccgcaccataaacaaaccgatcggcactccaaacaagtgctgcaaaaccaataattaaaatgacaaaagaagtcaccattgtgatacgccaatattactgaaacagatgactgcaaatagtaacaaaagcgagcaggaaagtataagtaaaagaataggctggcaggcacaaagcgcggttttttaggaatgagatttcaggtgtggttaaggagcaactgcgtagagtttaatttggcgaatagaaaatattacaaaattttacgaattgttttttccatcttgactaaaaaaactttaaaatggcaaaacgagtgaaaaacgttatggagagcgacttgtcgcaatcaatagtagaaatcaaggatgtaaccttttcacggggcgatagaatcatatataaaaatatgagttttaacattccgaaaggcaagatcaccgctatcatgggaccgagcggcataggtaaaaccaccatgttacgcttgataggtggtcaacttaagcctgattctggtgatattttgttcgaaggcaatagtattcctagcatgtctcgcaaggagctttacgctgcccgcactaaaatgagtatgctttttcaaagtggtgctttattcactgatatgtctgtgtttgacaatatcgctttccccttacgcgaacacactcaacttagtgaagatttaattcggcttgtagtccttatgaagttacaagctgtaggtcttcgtggtgcacaagatttaatgccgtctgaattatcaggtggtatggcacgccgtgcagctttggctcgctcgatagcccttgaccccgaactgattatgtatgatgagccttttgccggccaagaccctatttcgatgggggtacttgttaagctgatcaaatcactgaatgaggtgttaggtttatcgtcgcttattgtaacgcacgatgtaaccgaagtgcttagtattgcagatcacgtgatcattattgctgatcaaggtgtgattggtgaaggctcacctgagcaaatgcaaaatcatcaatcagagcttgttcagcagttcttaaaaggattatcggatggtcctgtaccattccattatcctgctcctgcttatgatgatgaattattgggagtaccgaatgcttgatctgtttcaaaagctaggtcacaagacgttaggccgttttgctgcgcttggtcgctctacgcaaatgttgtttggcgcattagtaaatatgccaaacttcaaaaaaggcacgccgttactgatccgtcagttgtatatggtcggctcacaatcgcttttaatcattatggtgtcgggcctgtttatcggcatggtgctcgctttacaaggctataccgtattagtcggttatggtgctgaagatagcttagggccattggtggcactaagtttgttacgcgagttagggcctgttgtcacggcgttattatttgctggtcgcgcgggcagtgcactaacagctgaaatcggcttgatgaaagccactgagcaattatctagcttagagatgatggcaattgacccactaaaacgcattattgccccgcgtttttgggctggctttattagtatgccattgcttgcattaatattttctgctgttgctattatcggcgctcacttagttggcgttgattggcttggtgttgattcaggtagtttctggtcaatcatgcaagcgcaagtgtcgtttcagcaagatattgtcaatggcatgattaaaagctttgtatttgccttgattgtaacgtggattgcgctttacaaagggtatgactgtatccctacttctgaagggataagtaaagcgacaacagaaaccgttgtacactcatcactggcagttttaggttttgactttattttaacagcggtaatgtttaccagctaattagggtataaagatgaattcacggaaattagaaattttagttggcttttttgtagccctaggtattgcggcttttgcattgcttgcattcaaagtagcaaatgccggcattagtggtagcggtgaaacgtaccaactaaatgccaagtttgaaaacattggttcgttaaaagcccgagcgccaattaaggtcggcggagttgttgtggggcgtgttgagtcaatttcaattgatccaaaagagtttgtgccagtggttaacatggcgattgacgcaaactatttgtgtaagttttcagatacaacctctatctctattttaacatcaggtattttaggggagcagtacttgggtattaacccggttattgctgccgattctgcagagcaacgctgcatgggtgaaaaagtgacagccgctcaagatgatgctgctttagatgatttgtttggtgttgaaagtaaagcgcttgctgatggtgattacatcaccgataccaagtcagcattagtattagaagagctgataggtcagttcttgttcaaccaaggaagtgaataatgatgtttaaaaaatttctaatcgctttaagcgtggtgtttacggtaggtgtacacgctgcagagcctgaggtcgatttaaaagacccatacaaaatggtgcgtaaagtatcagataatacctttgcacgtattactaaagatcagcctttaatcgccaaagataaagagtatctacgagtgatcgtagaagaagagttaatgccttacattgactacaagtacgctgcacttcgtgtgttaggtaaccatgtatcaaaagtacgtgcaatcgaagataaagaagaaaaggcaaaagcaatcaaagatttgcaacacttcattgatgtgtttcaaaaatacctaattgctacatacgctggtgtgtttacgcagtatacaaatcaaagtgttgagtttggcccagcccagccttttaaaggtcaagatgtggtactagtcaaaacgaaaattgtggaaccaggtaagcctgatattaaaattgactttaaagtacgtgaagaccgagatggtgattggcgtgcatacgacatgattgccgaggggatcagcctgcttgacgctaaacaaagtgaattacaaggcattttgcgtcaacaaggtatcgaacacgtgagtgacttacttgagcaaaagagccaactaccagtgcagtttagaggtgaaggtggcgatgagtaacgttgatattactcaactcgaggataatcagtttcgggtcagtggtgaactgacccgaaactctatcaccaatgaacgccttctgaacaccaagtcacaatctacacacaaaacgtggtattttgacctttctggtgtatctagggttgacacggcgggcttagcttggttaattcactctttcgcagaattaaagcagcaaggtattcgccttgaattgcaaaatattcctgagcaactgcaaaacttgatgcagttgggacaggtcacaaccttatttgagtgagatttatggaaacaagccaagtcgaaacgttattacgcgacgaattaaagctagacgaagtgattgttaaagcaaacggtagccactacgaagtgattgctgttggtgagtgttttgacggtttaacgcgcgttaagaaacaacaattggtctatgctccgttaatgtcaacaatctcagacggtacaatccacgctgtatcaatcaaagcgttcacgccgactgaatggaaacgcgaacaaaaatttattttacctcaatagtttcagggcctcctcatggatcaatttgttattcaaggtggcacctcgctggcaggtgaagtcactatttctggcgctaaaaacgccgcacttcctattttgtttgcagcactgcttgggcaaggtaaaagtacctttagtaacgtaccgcgcttacgtgatatcggcaccaccgaagctttacttaaaacgcttggtgcaacggtagaatggcagcaagatacgctgatcattgatggcgcgacggttgataaaactttagctccgtatgagctggtaaaacaaatgcgtgcctctgtgcttgctctggggcctttagtggcacgtttcggtgaagcacaagtttcactgcctggtggttgtgctattggtgcccgcccggttgatattcatattcaaggacttgagcgcatgggcgcagtgatcaaggttgaaaatggttatatcaatgccaaagttgatggtcgtttaaaaggcgccgaaatcttcatggaaatggtgagtgttggcgcaacagaaaacttacttatggccgcaacgctggctgatggtaaaacagttcttgaaaacgctgcacgcgaacctgagatcactgatcttgcgaattgcttaattgcgatgggcgctaaaatcagcggtgcaggtacaagccgcatcgaaattgaaggtgttgagtcgttatctggttgtgagtacagtattctacctgaccgcattgaaacaggtactttcttggtagctgcggcaatggctggcggcgaagtattgtgtaaaaacacagatcaccatagccttgatcccgtgattgaaaagttacgcgccacgaatgctttggttgaagtgactgataacagtatttaccttgatatgcgtggtcgtgaattaaaagcggttaacattaagaccatgccacacccgggctttccaaccgacatgcaagcgcaatttaccgctttaaatgtggtagcgaagggcagtgctaccatcactgaaacgatttttgaaaaccgttttatgcatgtacctgaactacagcgtatgggcgcaaatattcgcttagaaggtaatacagcaatttgtggtgatacagaaaggttatcgggcgcgcaagtgatggcgacagatttacgtgcgtcagcaagccttattttaactggtattgtggcgcagggtgagacagttgttgatcgcatttaccacgttgaccgtggttatcagcgtattgaagacaaactaagtgcgctgggtgctaatattaagcgccgttcaagctaataacttaatacttataaaaaagcctaacgtctgttaggctttttttggttaagattttgactctagttcgccaacagtaaccataatctttaatatctcaccatcacgatagacttcaaattctagcttattgcccggttcagtttttgctagtttgtctaaaactagttgtgggttagcaaccgaaataccgccgattttaattacgatatcggtttttctgatccccgcttgccacgccggtccaaacgggtctagctcggtaatacgcattcctgctacaggcgtaaagttatcactaacatctttgcctgtgctatctatgccggtgcctctaaaacctaaataacctcgtacaacacgaccatgtttgattaatatatccatgatgtctttagcgattgagtagggcactgcaaagaaaatgccttggatatccaaatctgcatgggttttgaattgcgccgacgtgatacctactaagtcaccacgtgaattaactaatgcgccacctgagtttcctacatttatggcggcatccatttgtaataggctgctgtatgggctgtctattaagttttgcttacctgtagcgctaataatcccttgggtaatggtttgacctaaattaagtgggttaccaatggctaaaacaacatcgcctacacgtggtttaaaattgtcattaacaggaatgacaggtaagtgttcagcgtttatttttaataaagctaaatctgtttcactatcaaagccaatcacttgaacatcataaaaacgacgaccgtctgccagtgtaataatgatcaagtcggcatttttaataacgtgataattagtcagaatgtaaccgtcttgcgacataatgacgcctgaaccaagtgcctgaacagtgttttgacgtttgtagcgtggttggttagaaatgctttcggaaaaaatagttaccacagaaggggctgcacgttgcactgcatcggcaaagctcatgtgctgcgagctgatcgcaacgggtaaattcatgttgggtaataaagcgctacgtaaactcgggctaaaaagcacgaccaagaaggcgatacctaaaccagtaaaaagcggcggtaggataaatttcaaaagttttagcacaatattcttattatcaatgagcaattatttaatgatggcacaaaaaaaataacagcggcaagcaccactgttattttttcatgaaaaatcaaataaaattattgaattaatacaaaaataagctctcgacctcgttttactcctaggacgatattacctttagtgttttcgataatcttattcatgtcgcggattgtttcaacacgttgacggtttacttgcataatcacgtcaccttcttcaaggcctacccgcgcagctggagagcgtgctgccacactggttatttcaactcctttaccatcactcttctgagtgttctctaacgttgcaccttggaaagctgggtgagtttcttcgccagctgctgttagtgaagctgcgccatcgagggttacatttactattttaactttaccatctcgataaataccaagttttacgcgtttgccttcaccaagcgtggcaattttgctgcgtagttcatggaacccgctgatctcagtgccatcgacgctgatgatcacgtcaccggctttgatacccgctttgcttgctgcggtgtcatccatcacctgcataacgtaggcaccctgttttacatcaagtttttgtgctttagcaaggccagcgtcaagcgggcgacctgaaatgcccagtgaaccgcgacgaacttcgccatgctcaatgatttgatcaacgaggtttttcatcatggttgatgggatagcaaagccgatacctacgtttccacctgatgcgcctaaaatagcggtgttaataccaatcagctcaccatttaggtttactaatgcaccaccagagttaccttggttaatagccgcgtcggtttgaataaagtcttcataaccttctatgtttaaaccactgcgaccaagcgcactcacaatacctgaggttactgtgtggcttaaaccaaatgggttaccgattgctaccgcaaaatcacccacgcgcagcttatctgagtcggcaatttttagctcaattaagtcatcagcatcaatttgcagcaatgcaatatctgattctttatcactgccaattctggttgcctcgtactcacgaccatcctcaagggtgacaatcattttttctgcatcttcgacaacgtggttattggtaacaatatacccttcgtctgcattaattatgacgccagaaccaaggccgctaaattcacgtttttgactaccgccgcgtggtacgccaaaaaagtcatcaaacggtgttggacgacgacgaacttcttttgagcctgaaacttgaatactcaccacgccaggagttatttgttctaacattggtgcaagggttggtaactgttgaccatttaccgccactggcagtttagccattgaaactgcaggcgctaacaataagcttgaagataaaatagcagcactaataacagataatttcattttcatagtcagggtttactccacatcagagataaagcaaaaactaaaaagggctgcataagcagcccttttcttggtttagatataaagctgttatatctaaagactatggggtcaaaaaaaagttcatcaagaggctttagaatgttctgaaactttatttgaaccagtaaataaccctgtttcaccgaccacatagtctgcaggttgtgcttctgcacttgagcgatcgccacgacggtcttgtaatgagctttgcaattgctcagtggtttcttttgaaaaaaacggctcgttagggtgttgctttttatctgctaataatagtttgttcgtttcttcaacatggttgagaagctggtcatagttatctttcatctttgagacaagtttccctgtgcttgccaagtgatcggcaacatcttggcggtattgctcaagtgcattatttgcttgctctacttgttgttctaactcatcttgcttaaattgtttctttgttacaaacgcaccaatgaaaaatgccgaaattgcaacgatgataagaatacctacccaggtaattgtgcccataaatctacccctttgggaaaaaataacaaaaacaaatgctgtaaaagcacttatagtccaatcattattaaaatatgcttaatttgattgtgaaatcatactgcgggttaatataccctgagatacgatgcgtgttaatatactctgcaaatttaactgtgttttattgtaacgacctatgactccttggcagaagtaccaacaagatttacaacgtgaagactttgtacatgatgcagcacaagaaaatgctgtgcgtcatttgcaaaggctctatgatgacctaacggcagagaaaccagccgctaaggggtggtttgccaaactcttctctaaagatagcacgccagccataaaagggctctatttttgggggggagtaggtagaggtaagacctatttagtcgatactttctacgaagctttacctactgaacgtaagatgcgtgtgcactttcaccgttttatgcatcgtgttcatgatgagcttaaaaagttaaaaaataccagtaatccattaaatgtggttgcagatatctttaaagcagaaacagatattatttgttttgacgagttttttgttcaagatatcactgatgccatgctgttaggtggcctgatggaagagttatttgagcgcggtatcgtattagtggcaacttcaaacattgtacctgacgagctataccgaaacggcttgcaacgcgcgcgttttttaccagctattgaactagtaaaagctaacaccgagattgttaatgtggactcgggtgttgattaccgcttacgtacccttgagcaagccgaaatttttcatagcccacttgatcagcaagcggatgataatttatttgaatactttgataagttgtcgccagagcctggcgtgctcgataaagcgattgaaatcgaaggccgaatgataaaaacgcgaaaggtagctgattgtatcgttatgttcgactttagtgagttgtgcgaaacagcgagaagccaagtcgactatatggaaatcagccgactttataacactgttattttatcgaatgttaaagcgctcggccaagctaatgatgatgcagctcgccgttttattgcgttagttgatgagttttatgagcgtaatgtgacgttaattatttctgctgaaaagcctataactgagctgtatagcgaaggtaacttaaattttgaatttaagcgctgcatcagtcgattgcaagaaatgcaatcgctagaatatttagcgagagagcatttagcttagtgagcagttagccgtcactttaaagccgaaaggttttgaatataaggcgcgccaagcaagcgtgacgcctacgattgatgtaggcgtgaaatttatttcgcgcgcacttattagctgatagctgaatttctcgaataaaaaacaaccatcatatagcaatgtggtttaagtgctggtatactcccgcgtctgccacgttgcgttctattgccagatattagtttagcctctaattgatggctcaaagtcttaaactcgaaggggttaaagcattcaacttagagcggtaattaataataattacctgtggttttaaattaaaaaacattggattttaataaatgaaaacgtttgttgctaagccagaaacagtaaaacgtgactggtacgtagttgacgctgaaggtaaaactttaggtcgcatcgctactgaaatcgctcgtcgcctacgcggtaagcataaagctgagtacactcctcacgtagatactggtgattacatcatcgttatcaatgcagagaaagttactgttactggtaataaagcaaaagacaaaatgtaccacgcacacactggtttcccaggtggtcttaagtctactactttcgacaagcttcaagctgcaaagcctgaaatgattatcgaaaaagctgttaaaggcatgttgccacgtggtcctttaggccgcgaaatgtaccgtaaacttaaagtttacgcaggtactgagcacaaccatgctgcacaacagcctcaggttctagacatttaaggagcactatcatggcaaatcaatactacggtacaggtcgtcgtaaaagttcaagtgctcgcgtattcttacgcccaggcactggtaacatcgtaatcaacaagcgctctctagaagagtacttcggtcgtgagactgctcgcatggttgttcgtcaagcattagagcacgttgaaatgactgaaaagtttgacctacacatcactgtttcaggtggtggtactactggtcaagctggtgctatccgtcacggtatcactcgtgcacttatggagtttgacgagtctctacgtcctacacttcgtaaagcaggtttcgttacacgtgatgcacgtaaagttgagcgtaagaaagtgggtcttaagaaagcacgtaagcgtccacaattctcaaaacgttaatatttacgtttatcagaataccaaaaacccagctccggctgggttttttgtttcttggagccatcagctttcagaagtcagtttttagcagatcgagagggggctcagatattgatgttttacatccatttctcaggttatatcggggtcagatcacagatcagaacgctgacgactgatagctgatagtaaaaaccctaccttttttcgttcgatatttaaccgctgatagtaattactgcgtattacagtaaaaaaacttcacgatttagcgaaattagcttaaatccatcagttaattgatgaatttttttgctacaattggggggcaagtaatgtgagtgagttcaacaacagctaatacagaattctgtttcctcttagtgaggttgatcttggtcagtatattgtttttttatatgcgttatcataaccagcggcttcatgctcgagctggccctaattaatcaactattaaaatgggtttattcgagcatgggactgtgaataaccttgttttaatcaaggcttttaattatgatcgcgtctattttaaaatttctaaaaattaacctgctgtaactgatgttctcaatatggcaagtgttgggaatcatagtggagataagtggatgagcaatgcgcctgtagacaatggccgacgtcgctttttaaccatagctacctctgttgttggtggtgttggtgcggctggggctgctgttccttttattgcgtcttggaatccaagtgagcgagctaaatctgcgggtgcgcctgtagaagtagatatcagcaagcttgagccaggacaattaatacgtgttgagtggcgaggaaaacctgtttgggttattaatcgtacaccaagaatgcttgaacagatgaaagaacatgaaggtcaacttcgtgatcctgcatctgaagagcctcaacaacctgaatcatcaacaaacgaataccgttctcaacgtcctgagatcttcgttgctgttggtatttgtacgcacttaggttgttctcctagcttcctacaaggtggctttggtgaaaaagtagagggcacagacgacggtttcttctgtccgtgtcacggttctaaatttgatatggcgggtcgtgtattccaatctgtacctgcaccattaaatctagaaatccctccgtataccttccttgatgacacgactattttagtcggtgaagaaaaaggagtggcgtaatgtttggtaaaattattggttggatcgacgatcgtattccaatgacacgtgtttggaacatgcacattgcacagtatccagcaccaaaaaactttaacttctggtacttctttggctctctagccatgttagtacttgttaaccaaatcgtaactggtatctggttaacaatgaacttcgtaccgtctgctgaaggtgctttcgcatcggtagaatacatcatgcgtgatgttgaatacggttggttactacgttaccttcactcaacaggtgcatcagcgttctttatcgttgtatatctgcacatgttccgtggcatgatctacggttcttaccaaaaaccacgtgaacttctgtggttattcggtatgttcatcttcttagcgcttatggctgaagctttcatgggttacttattgccttggggacaaatgtctttctggggtgcacaggtaatcatttcactattcggtgcgattccggtaattggtgatgacttaacgctttggattcgtggtgactacgtaatttcaggtgcaacgcttaaccgcttctttgcactacacgtaattgcactacctttagttatcgttatcttagtattcttacacattgttgcactacacgaagtgggttcaaacaacccagacggtgttgaaatcaaacgtaagaaaggcactgtagctgaagaagacaagcctaaatttaaattccacgagtattacaccaacaagaaagacattgttgatgcaatcccgttccacccttactacacagtgaaagatattgtgggtgtggttggtttcttaatcttattctgttgggttgtattctttatgcctgcgatgaatggtttcttcttagaagcgccaaacttcgaagcagctaacccactgaaaacacctgagcacattttccctgtttggtacttcacgccattctatgcgattctgcgcgctatcccagataaactaatcggtgttatcgcgatgggtgcatctatcgttgtgcttgcgttactaccttggattgaccgtggttcggttcgttctattcgttatcgttgtggcttacacaagttaaacattgctcaattcgtggtaacgttcgttatcttaggttgggttggtgcaactccacaaactgatttcaaaacgctgttatcacaaatcacgactgtgacatacttcatgttcttcgtattgttatttgtttacagtaagaatgagaaaactaagccattaccaacgaggttgacgaaatgatgaaaaagctaattatcggtttattcgcattgttgccatcgttgacaatggcagcgggtccttcggttcctttaatggatgccaacattgaccttaaagacaatgcgtctttacagcgcggtgctaaattgttcatgaactactgtcttggttgtcaccaaatgcagtatcaacgttatgagcgtacgttccgcgacatcggtattcctactgagattggtcaagagcaactgatttttgatggctcaaaagtaggtagccacatcaaaaacgcgattgataaagatgacgcagctaaatggtttggcgcagcgccaccagatcttacgcttgtagcgcgagttcgtggtactgactggatctacacttacctgaagtcattctacaaagatgaatctcgtccgtttggcgtaaacaacgttgttttcccatcggtaggtatgccgcacgttcttcaagaactacaaggcttaccaacaccaatcactgaagaagtggaagaacacggtcacactgtgactaaagttgttggcactgaaacagatggttcaggtgaaatgagtgttgacgagtatgaccaagctgctcgtgatttaactaacttcttagcttacgttggcgagccgtcacgtttagagtcagaagcgttaggtcttaaggtaattggtttcttagtgattctatttatcttggcattcatgctgaagaaagaatactggagagatgttcactaattctggacgttttgaaaggtaattttgtgataggggcttaagcccctattgctgtttttgtaatataatggaggtaggcatggccgtagctgccaataagcgccctgtaatgaccctgttttctggtgctaactgtatgtatagccaccaagtacgtattgtacttgctgaaaaaggtgtaagtgttgacattcacctggctgaaaaggataacctgccagaggcacttcatgaaattaacccttacggtacagtaccaacactgatcgatcgtgagcttggtttatatcaggcaaacatcatcatggaataccttgatgaacgttttcctcatcctccactaatgccagtatatccggttatgcgtggccgtagtcgtctgatgatgcaccgtattgatacggattggtatagtctagcgaataagatcactagcggtagcagcgaagcagcacaagcacgcaaagagcttactgaagcgttacttgcaatcgcacctatcttctctgaagctccttactttatgagcgaagagttcagcttagttgattgttacttagcgccgttattatggcgtttacctgagcttggcattgaacttaatggtgctggtgctaaagagcttaaagaatacatgttgcgtttatttgagcgtgaatcattccaagcttcattaactgaagcagagcgtgagatccgtttataatgacgcctaatcgtccttatttactacgcgctttctttgattggattgttgataatcaatgtacaccacacttagtggtgaatgctgattttcctgctgtacaagtaccaacacagtttgttcaagacggccagatcgttttaaacatcagcccatcagcggtcacgcaatttgctatggataaccagcaactgagctttaatgctcggtttggtggtcaacctatgcaagtgtatgtacctatgggtgctgtgctcgcaatttatgcacgtgagaatggtgaagggactgtatttactgcagaagaattcatcgaggacgaagacgattttgctccggtattagaaagtgtagacacgcctgacgatgtaacgccagatgatgaaccaccaactaaaccagagaagaaaaaaggtgctcacttacgagtgatcaaatagccttattaaaatcgaaaaacccgcttataaagcgggttttttattatcaacttacagttcgtattatagatattcaaacactttaattacacgctcaacacctgatacgtttcgtgccacatcaaccgccaagttggcttctgtatcactcactaagcccattaagaacacctctccattctcagttatgactttaatgttgttactgctgatattctcagtggtgagtaattgggttttcacttttgaggttaaccatgaatcgtgtgtttgtgtgctcatgccaatattagagctgatgcgaatttggttatgaattttacgaataccatcaacgccttcaattgcacgttgtgcttgctctttcatttcttggttaggcacttgaccaatcattaatacaataccgttaacgctaataacgttcacgttagcaaatttgtgtaaacgttcaatttcactgatagcgattgaacttttaatttcgatgttgttatcgtcaatttgtgagccaattgtgcgacgatcatttgctgctgtgactgcgcctgcagtgcctgcaacaactgctgcagcacacccttgtagtaataatacggtactaattacaagtagagactgttttaacattaattttcttcctgtgggaataaggttaaatcaataagctcacttaaacagtgtaagttcactaaatgtgattcaacaatacgactagggcgctttgatggcacgcgaatttcaacatcattggggcccaataatccaactaattcaccgccgtcatcaccgactaatactatgactttcatatcgcgagtaagtgccgcctcaaccgcagaaataatgtgtttttcattgccattaatcgcgatagctaaaatcaggtcaccttgctgggcaaacgcacgaatttgccttgcaaaggtttcgtgctcatctgtttggtttgtcgagcctaaattaacctgctcttgcgcgagcgcaacagctggtaggcatggacgctcagtttcataaaagttaattaatagcccagccatatgttgagccagcatgtggcagcttggcgtgccgcaacaaagcaatttattaccattaattagactttgcgcaatggtaaatgcggctgattcgagggcgcttggcagtacttcacctgcggcaatttgaacttgaatattttcggtaaagatcttttttattgtttcttgcataacctaccaattaagctgacgccataagcgttagtaaacatttttaaaccagttaattgcactgttagtctcgccggtaatggctagataatctaatcgcatagcctggtttgatatttttttctctgcaagataatgggcaattgttcgccttaatcgttgctgcttttgtttgctgagtgcaacgttagcaccccctcgaagggtgttttttctaaacttcacttcaacaaacactaaagtttgtccatcacgcataatgagatcaagctcaccatacttacacagatagttacgctcaatagcaactaatccatgctgtattaaatactgttcggcctgtttttcataatacaggcctttttcgcggctattttgccacaattgcttaaaccacgacatagcttcatccttgagcatgcgttaatttaatcagctgagttatacctcgatgctgattgcataaataaaggaataggttgttctgttggtaaatcaacagcgattatttgcttatttttgtattgagcccagtctaggctgcgggttacatagccattactagcaatgctaaggtcaccgctgattcctgtaaagcgtttgccttgtaccatactaagttgttttacttcacccagcatactggttgcatcgaacgccatagcaaaaaggcgttggttgatgtcagcatgttcaggccacaagctatcatactgttgacgcaagttatgttgttgaatttgaccttcgagcatccaaggaagctcagtaaaataaagaccatctaaatcgcctttatcggttctatcaatttgtttactgtgactttttgagctggcgtaaagcggaatgcggtcagcaaaagtacttacgttaacgtctaaatagggcttaattaaacgtgtttcggtggcatcacctaaaatgtaaattacatctatatcactacgagaacgggtttcactttcaacttcttgcttaaataatgatttaacaacattaatgcgctctttactttggtctacctcaagcaagccggtaattgttttaggcatatctgctttatcagagtaaaagccaatttgcggttttacttcgctgtaacgctgccattgagtgttaaagtattcaaccaagcgctgaccattattattattaggtgcaagtaacatgggcttttggtagcccgcagttaaaaagcgttctaaagcttgttgaacttcatgttcagggttaagagcaaagaaaaagtgctgctgtgagatccgttcgccatcaaagctgtttaagtgcatcactgggtaatcaactagcgtttgtgccgtattcaatttttcaatattacttttaagcaatgggccaataacaaagtcagctttaaactcgcttaacttaagtgctatctcttctgccggtaatgattcatcaataaatagggtttctgttattgctctgttatcaagtgccgcaagcacgcctgcttttaaggcgtcgcccaaacgttcattggcacccgattgcggaataagtaccactaaacgatttacttctaatggttcgatttgtacaagctcagtgaccttttttggcaaaacttctgccgcagggtggccagggtaacggcgtaaccagttattcattgcttgatgaagttctaccggtgcacctaaataaacttgatgataaagcgctaagttaacccagccttgttgtacaacagaacctcggttaaagcgctcaagagcataggatgaaagctgagtaaggctttgccacaaatctttatttaaattagcgacagtaaaattgttttcactgcttaatgttgatgctgcaaagtaaaatggcatagctagtttaggcataccttgagaagcatatacccgtgctgttaagtatttgtgccatgcttgatgctcaggctgtgttaactgaggctcaagctgttgtagttgtgctagcgctaagtcgctcttaccttgttgctctagggcaagggcgatataaagtttgttttgaatttgatcgacacttggcgtgctttcaagttcaaggcagatcttttctaacagttcccagcgctcttcgttaattgcagcatcgcgagcagtataaagaagttggattttatcggcaccttggcggagcagtgccgtttgatacattgattgtgcgtcggttagttgtgatagtccaagctcagcttggcctgactgattttctgaagtatttagttgtttttcggttgtgctacaagccgataaccccgacaatacaattaatagactaacaagtttaagtcgcacaatgatttcccaatacgttaacgcgatttgcttatattactgactgacgcaggagacctcaatgttaaatgaggacaattcagataaaatcggcactctttacattgttgccacgcctattggtaactttgatgacatcagccagcgtgccatccaaaccctatctgaggttgacttaatagccgctgaagatactcgtcacacaggaaagttgttaagccactttaatatcaaagcaaaaacctttgctttacatgaccacaacgagaaacaaaaagcgcaacaaattgtcgactggctagagcaaggaatgaacattgcgctggtatctgacgccggcacgccactgattagcgaccctggttatgcggtggtcaatttatgccgtgaacaaggcgcgcatgttacgccagtaccaggagcgtgtgctgcaattaccgctgtatgttgttctggtttaccgacagatcgttttcagtttattggttttacacctgcaaagagtaaagcaaggcagaccttttttatcgaagcggtaaactcaggtattactagcatcatgtatgaaagtacccaccgtattatggcgagccttgatgatttagaagcagcgctcggtgcagagcagccagtggtgtttgctaaagagcttaccaaaaccttcgaaacttttttcaatggcacggttgccgagttaaaacagtttttaacggatgatccaactaagcagcgcggcgaaatcgtattgatgttaccgggcaaggcaaagcaaagtgacgatattccagaagatgcgcgccgcatgctcggtttactcgaagccgaaatgccactgaaaaaagcctgtggtgttgtggctgagtattttggtttgaagaaaaacgcactttataaagcaattattgacgaaaaagactaattctttactgcatagacgtgcgcgctcaggtatactgcgcgccgagtcagccgagataatcgctgcctgcaacgaaaatgcgcagggggaggaaagtccgggctccacagggcagggtgccagctaacggctggggggcgcgagcctacgacaagtgcagcagagaggagaccgccaacttcggttggtaagggtgaaagggtgcggtaagagcgcaccgggccactggtaacagttggttgcaaggtaaactccacccggagcaagaccaaatagggttccttatggcgtggcccacgttggaaccgggtaggttgcttgagccatagagcgatttatggcctagacgaatgattatccacgacagaacccggcttattggctgactcaccaaatcatattaaagcccgtagtgaatctacgggctttttgctttttggggtggagaaaatccactccgcgcttacaaaacagcggcttattggctgactcatcaaataacacaagagcctcggtatttaccgaggctttttgctttttagagctgattgctattgtggcctaaccattatactaaatagtgaaatttatcattattgttaaaccaccacattcaccatttttaaactgagttttacctttgagtactgagacacgctcgacgatccctaatacaccaaacccgcctttagaatttgagtttttatgttcaggtaggcctatgccgttgtcacaaataattatctcaagttcattttcttggtaagtaatatcgattgaaaactcagtggctagagagtgtttaacagcattggttgatgcctcttggcaaatgcgaaagatggcgatttaaaatcatcatttaagctatctatcggtccacttattttgcattgataagctattccagcttcatttaggtgctcagagaataactcgctttttaatgctgcttctaaacctaattcgtctaatagacgaggtctcagccagtgcattaacctgtataccgagtcatacatatggcttgaaacgttttggagtcttgtaattgtcgatgctaactcgttatggttggctgttttcttttctaatattgcaatatttgtttttaaagctgtcaggttttgacctatatcatcatgtaattcttgtgaaagctggcttcgctcagattcttgaacattaacaactttagttgctaagttttgagttaacgtactaagttcaattaattctttattttgctctaataatgcggatttagacttatttaattcagtaagaaatgcactgagcaaaagagccagaacgctgtaacttattatgtaaagttgcgtagtcaggagtaactcggtttcattcacaccatagacgttaatgagtaaggatataacagttacacttgcatagctcaaagcccctaaggccccgtatcgatagctaaaccatatcaacggaaatatagcgagcattcgcaagaggtagagtgatttaggttcaaacaggtaaaccccaatgaaaacagtgaggcaaaaacacagctgcactaaaagtgtactaacctctttagttatgagtttatttaattgctggtaaattgttttagcatgaaacgcgaaaagcaacatgataagtgtcgttatgataccgccaagctgatgggctaacatcatttcaaaacgatcttcatcagcaataagccggtacttattttggctatcactcggtaagataatgagcattgatcgtataaagcgatatgaaattgcaataaataatactgtaacagcacttttaacagtttgaatatctaatcgaactttgaaaagctttgccagcagaagaggagtaagaatcaaaaactctcggcatgcagagctaacaagtctataggggatatcatcaagaggaacatcataaaaataccaaacataactgatttgtcctaatgtaaaacctacagctaatgcaggccaataacgtaaaggaaaaaacagataacaaactactctgaagccaaccggaaagtaccaactaacaaagtcctcgtacactacatagttaaaagaaagcaaatataggctgttttcgataactggtgctattaaaactattaagcacgaaaacagtacaaactttactatgtcactgcgctgtgtgctcttcaacttgagggctagcggaacaaagtaacttttgttgaaaactctatccatgagtaagcataacctttttataatatgtaaacttgcgtcgtatcaaactgttgtttggcgctagggttacacaaagtataacgttgtgtaacttgaatttcagctttatttccaataagttgtaataaatgcccttttgcaatatctgacatattacgcttatgctttacaattacttcacgacctaaagctccttgcaagcgtggtttcaggaaagctgttttggttaccggcttgatatgctcgcactgagtaaaataatctaaacattgctgttttgctttattgatggtctcatcgttgcttttgattatgtctacatttttaatgaaatgaacaaacgcggcatttcgtgaagtaaagttagccgtaacattagctaaggcttttgattctggccatttacgcatgactacatatttatttttacctgttttgactaggttagtagacccttttgtcattttacttgtccactcaatacgataatttgactcaccaatgtaatgtagtaatacggtgatcttgtgaaagtggcttgtttcccctgcgatcttcttcatggctatttccttgtcattttgggtaagcttacaaggagataaacaataaaattatttccacttttcttaggcttataagaatttttcttacctgagtgcgtttttaccgcgttataatggggattaatcaatacatggagttgttatgaaatttgcacttattgacgatcatcaaatggtaagagagggttttagggctctcatcgaagaggaagatcctgattggcaagttagctttgaagcaagtagctacaatgagtgtctacaaaacttaggtgatattgatatagattgctgcgttattgatatttcgctaccagatagaaatgggttagaagtagctgagttaataggcgagaagctaccaggtgctaggcgtataattttgagtatgtacgaggaaaaatcttacattcaaagagcgttagacataggtgttgatgcttatctatcgaaacgagatgcagctgaagagttaataacagcaatacattctatctttaaaaaccaactatttttaagcccttcaattaacacgcatttcttaaaacctcaaaaaactgacagtgtattaaacaaattaacgccaagagaattagaagtttttaagctacttgcacagggctttaatgcgaaacaagtttcacaactgattgatataatgcctaaaacggctcatgttcatcgtgccagcattatgagtaaactgaacttaacttcgcaaattcaaattactaaactagctcttgaaaaaggggtaattcttattgatgaaataggctagttttaagacgctattaaatctcaaaaaccatactgtttttaactagttagtcatatataccaagcttaaactcattccaaagcgatggagcaatgacacattagccttacaattgagctcgaaggactgtcatatcagtgcatagagctgcacttgccagagtctttttaaatagaaattttctgctgaacaatccgcttaaatactacgacaaagtcttcacattaaatttgataacttcactgtatatctataaagcaggttatttcatgaagacgttaatattatttattttgacattaatttttcttagtggctgtaaacaaagtcatttagatattttccctgaactctcagatgagcggttgctgttgcaagagctttcggtcgcacaaatgaaggctgatatagatgctttgttagagggggtgatccagcgccatcctgacatagaggaatatgcaaacttagctttgctaagagcaaaagctgaacagcttaaagcaagcctaaacaagccacttaatcgcgtggagttttatcgagtggtcggtagcctaacgtcctattttcaagatggacattcatttctcatatggccttatcaagaattaaatacgctgcgtgaagcagggcataatacgtttccacttgctgtaagtgttaatgagaaaggcaagctgcagctcaaacacgcgtatagcttaggtgaacagcgtattcctatcctgtcagaaataatctcaattaatggtgtaaatgcagaccttcttttatcacagctggcgctctatgctggtggcgaaaccgctttattgcgtgagcacgctgtggcgatgaggtttggaatcgctttatgggcgcgctacggttggttagataactttgaggttcaagtttccacccctgaggggattaaagcctttcactttgaatctcaaaaaaagtggcctaaagtagatgaaaaagcacaaggctttgttgccagttactctgataaagcacattattacaagcagttgtctaatgatgttgggtttatttatttaggccattttgatatcgagccacgtgagtttgagcgctttattgatcaaacatttagtaagattaaacagcaaaacgtgaagcaactgattatcgatattcgcgataatcccgggggcaatacagatactgttacttacttatcacggtatttagctgacaaaccttttaggttaatttcaaagcttaaagaaaagttaaatgaagagaatagaggttggttcaacaacaaaggagaagttggtgatattgtggtaactgattgggatgattgggaatcaccaataaataaagcgcagcgctttgatggcgacacatttttattaattgggcctgtgacttattcagcatcaattgtgctagccaccactttaaaagacaatggatttgcaactttggtaggtgagacaaccggcgggtatgctaatcagtctgctcaagggaatctgtttaacttacctaactcagagttacgtgcttatgtaacgacaagaatgctagttagacccaatggcgaattggcacgtcgtggtgttacaccacattacagtttaagcgactacaatttaaatgcctgcaaacatgtgcaagcagataatgcctatgcatttactaacgctaaccaacaagataaagcacttagattaatcggcttgctactaagcggagagcttcaacaatgcgaacaagaagttgagtaacacgatgacacatcgcactagttcagtattagtcgtagaagatacacatgatatcgctattcagctttgtgactttttagagcaaaaaggttttttggttgattatgccgcaacaggaaagcatgcgattaggcttgcagcagaacataattatgatgtgattgtgctagatttaatgttgccagatatggatggtatacaggtttgcaaagaaattaagcaaacctgcgatactctagtgcctattttgatgttaactgctcgagacagtatagagcataaaattgaagggttcgggtcgggagctgatgactacttaacaaagccttatgttcttgaagaagtttttttacattgtctcgctcttacccgtcgcaataagcttcatcaaacaaaagtgatggaaataggtgagttaaaaataaatatcagtaccaaagaggttgaacgtcaggggcaggaaatcaaactatcaagtaaagactttgaaatattatgtcttattgctgaagcctatcctaatgcggtgagtaaacgccatatcgttgaaaaagtgtggggttctgatgcaccagaaacggatgcggttagaagccatatgtataccttaagaaacgccatagataagccatttgataccccgataataaagacgctccatggtattggcttcagacttatcgctaaataaccaaaagaaatgcaatgaagcacaaagcaaacactcatatttctaatgcaattactaaactggtgtttgcgatcacgctgacattaacactcctttacagcatcttcgtactaggttactcctgggtgattgaagataatatcttcaatcgtcttgtcgcgcagcaggccagtaacattaagcacaattatcacatgactggaaaaatcgatgtatcagataaacaaatatatcaattgtttaaaggttggcagcaagtacccacagagataagagaaatagtgaagagtgagccaaatcgtgttgagtatcgtcttgctgatggaaaaacttaccacctgacacgattttatttaggtgacaatgagtatgtgctgcttgctgatgtagcaaggtttgaagtaagccgagattattttaaaggcgtgcttgtgtggttggttgggtttagtgttattgcttgttgtttggttgccttgctaggctggcgaatgggacggaaaatagcaaagccgctcgaattgttagcgtacacagtgaaaaaattagaaaaaggaggtgaagcagcgtttcagcagtctattaagcatatgccaaataatgaagttggccagttggctgatgcgattgaacatagctttaagcaacttaatgatgcactcgccagagagcgcgactttactaaagatataagtcatgaaattaggacaccaatcagtgtgttgcaaaatacccttagtttaggctctgatagtgccacactagcagagcagcaaagcgatgaaatatacttttctgagcaggctgtaaaacaaatgcgcagtgcaacccaaaagctaacccaaacaacagatgtgttgttagcgcttgcacgaaatgaatcttctatcgcgcaatcagtgtcactcaaccggcttatcgaagactgcgtactgaatcattttgcattgaaccattcgcaaaagggtctatcgcttgagcttgaaattgatatgcctaatgacgaggtgatgattattgccaaccgtaatttgcttgaaatattagtgaacaatttgctgtcgaatgtcgttgctcatgcaagtgaaaaagatgttcaactgcgcattagcaaatcaagtattcgaatgaccaattactttgcacaccccttaccactaaaccttacatcaagtggcagtaaagccgctaatagtacaggtattggccaaggtttaagtttgattgagcgtatttgcacagcatgcggatggactatgtatgttgaaatagacactgagcagcaacgtttttcggtagttatcaatcttaaatagtaaaaaataaatcaactttcttcacaaaagcgcgacacaccagaacgtaaaatttatctcatcaactaggagatatattatgaaaaacgttctgataatcatagcttgcagcatcatcatgcttacgagtgtgttgttaccttctcagtcaaaagcagccacatcagttgaggtgcaaaagccaagtaaaaaaatagcgatgttaatttctggccacggacatagtgaccctgctttatcttacgacctagatgagttggtgcaaagttatcttatttttcaccgcaataatgtcgaaatagacattgtttcacctaagggcggtgcagttttggtcaaaaataataaggataagcttactcatgttagcgagttcaaaaccaagacgtcaggacttgataagttagctaataccttatctgcagagcgtgcaagtgacaatgactacgatgcgctgtttattgttggtggggatggcgctgtatttgacttgcctttcgatgtaaatactcaacgctggatcaccaagttcgctaagactaatacgccgattgccgctgtatgccatggtccagcagcactcgtaaacatacaactggatgatggtcgttattttgttgctgataaatacgtaaatagctttacatatttagaagatcacgcctttaaaaaagagaacatagataagtacccaatgatcgttcaaaccgagcttgaagcgcgtggtgctcactttattgcaaatagccctatgctgccttttgtatcgcgtgacggcaatttgatcaccgcgcaaaacccaacctcagtggcgaaagcggcggaagcgcttttaattaccataggtataacccccgttgctcgtgaagcgtttaaagatgaagccaccatggagttaatcgcaatggcgcgtagcatgggggtgtcgcaattagatatcgcgatgagtaaaaaccccgctcgctacgacaccatgtatttagcactgtatggattatatggatataagttggcacaaacggctcaagataaagcacttgaactacagttaatggaaaagattgccgagtattttaaacatccacagtatgcaactcacatgatcagtacctatctagaaatagggaataagcagcaagcaaaacgacactttaacattgctaaacaacagtttactgactttgagttacctgtaagtttagccgataagttagactgatagcacaaagactcaaagttatgagtataaaaatcgagtaaataatataaaacttctcgaatgaacgaagccaaaatcagtctacggctaggttgagtagagatctcttaaacctgcttgagtattcaaaagagcgttattaatgttaagaataggcttaaaggcctattctgccttacatacggctacgatagtcgagctggcaaacacaaacatactggcaaaaacccttttgtattcagtattctttatgagaaatatgactatttaagtagagcaaactctgatttttatcccactattgcgtttaaaaacagcataatctatcacccactgaattaagttaatgctttgttacatattttcgattttgtactaagcttaatctcacaacttaatttagtattttattcttaatatgatggcaatttattagtggctgcacagttcttattactgtaggtgcatgctgcaacagtgtttaagtctgtaaaaaactacctaatgcccacctgtgaagtgttggttctgtctgaagattattgactgagtaatttgtcgctattacggcgcgaacaatagaaatatgtatttacctgtaaggtcttgataggggttaagattatgattcagtccatgctaggaaccataaaaggtaggctaagcgcagggttatcattgatgtgtatgctgatcgtgttatcaggaatactctctttgtattacgttaatcagcttgaaaatcagcttaatcaactcagtgatgaagttgtgccagtgatggaaactacggatgatttgattgcaaatttgtgggagtccgcaaaagtcgctaacgagatcttagcaagtgaagaaatccccgaattaaaagcccgaaccgctgaaattaaagagctagcaaagctatttgatgacacagagcaagagctactcactttaattagtaaacctgagcgagtagcgttaataaaaaaagcgtctaccgagcaagatgagtttttatctcatgcgctaaaaatgtctgaacagaagctaattgaacttgaaaaagaaatcatctctgagaaattactcgatgagtttgatagttcaggtgcaaagctgatcagtatgctcgatgaatttgcagttgaaaatgaagaagaaatgcaaaaagcagaagatgaaggcgatgcgcttgtcgctcgaggcggctctgcgagtgccgtgaatgatgtgcttggttctctatttgaaagtgactacccagttgttgaagccgctttaaagttacagcgtttggttattgaaatgcaggatacctcgggtgagtatttagctgaggaagacccagctaaccttcctaatattcaaaaagaatttgaagccctagctaaacaagctgatgaatattttactgtgcttactaatttagctgagtcagacgaagataaggaagatgcaaaagtactgatcgcttcatttaataattgggtaactagcgcaaataatgaagatgctttatttgattcttatcgagatcagttatcagcagaagcgcttgccgatcaattaacagaagaattagaagttgatgttgataatgccgatgcttattttgaagagatagccgaagaggctgatgctttttcagacaacgcagatgaaaaagcggcagaagttcttaatcaagctttttttggcattctgtctttaacagccattgctattgtcatcggtgctcttgtcttgatcgtttcttataaaacggtattagcaccaatagacactttattaaatagcatggagagtatcgctgaaggggaaggagatttaactcagcgagttgacgcatcatcgcaagatgaactcgggcagttagctagagcatttaatcagtttgtttataaggtgcaagttctggtacaagaaatttcgactgctaccaacgaaattgttgattcaacagataggcaaagagatataagtatccgttcaaaagaggcgatattacaacaaggtacagagactgattcagttgctacggcaatgaatgaaattacagtgactgcgcaagaagttgcgcgtagtgcagcaaatgcggcgcagtcaaccgatgaagcaagtaatgaaacgaaagcggctaaaagtgtggtacagcaatctatttcttctgttcaacagctagctagtgaagtagagaagtcttctcaagtaattggggcgttagccactgatgtggttgaaattagtaaggtactcgatgtaataggcggcattgcggagcaaacaaatttacttgcgctaaatgcggcaattgaggctgctcgagcaggagagcaaggccggggatttgccgttgtagcagatgaggttcgctcgcttgcagcgcgaacacagcaaagcacagcagaaataaacgcgatgattgagcgtttacaaaaaggctctcaaggagcagtagacgcaatgaaacaaagcaaagaatttggtaactcctcagtagcaagttcacaagaagctggtcagtcgcttgatgttgttttttcgtcaatggatacgattaacgatatgaatacgcaaattgcgacagctgctgaagagcaaaccacaaccatggaagatatcaatagaaacatcaattctattgtgcaaatttctcagcaaacaatggaagcatctgaagaaagtatggaagtgagtcaaagtctagctcgattgggagagcaattaagaagcttggttaatcaatttaaatattaatcttctgcaagcctgtggtaagtgccataggcttttgtatatgagcgcagggtaaggctttttacttcctcaaataaaatccactgtgttcacattaaaactgaatcataattacctgctctaaagtcgtttctcactcttagtaaactaggaatttttcttagccatactaagaaagtctctcattaccataacggcttgttctttatatcctttgtataaaatttacttatgcttaaaggattgaaaatgagtgttattgagggaagtactaaggagtttggcaatacgactattcttcttcacagcttgggctcttcttgttacagaattgaatggtatagccggatgacgggtgcttcgacgagtttagcaaggctcaagcaaggcaagtacgttgttattcgtaagtgggcgcaagtaaaaaatatgtctgatgtttcgagtgaatttagtagtcgaaatagcgcgttgatccattttttaaataacgttgatattgttaagtcccatgatgaatggatcagtgccgctaagcagcattgtctaaatttgtttgtttaaaatgaggggcttaaacctgtaactaaagcgagttttcctaaaccgaggttgcaaggtgcaattggtaaagaagttgttgttaaatcgaagttgggtgaaaaggaaatagcgcatggtttgttgttacagcttattggtaatcaagctgaaatacagcttgcgaataataagaaaaagtatctcaccaagcaggtttatttaaggtaagtgtaagtattcaaatatcaaagtacacttcaattttaaatccatctacttcagtaacagtatatgtgccgccaagagcgataactcgctcttcaatgaatgataacccgtaaccaccagactcttgctgtgtggtcttggtttttccattatccataatagcaaggcgtatatactgttcatgagtgtttaagctaagccttagttcagtggctgtgctgtgtttgacgcagtttgtaaccgcttcttggcaaattctgtaaatagctgtttggtgttcatctgatattgctgaacttaagtttatttcagctacgtatttgatcgatgctttacttagcagagagttaaagcgtccttctttaagagcttgctctagcccaagctcatcaagctctctaggtcttaagtgatgcataatttgatagacagaatcatacatcgcttttgcattttcttttaggccttctacgagggtattttcattattttgttgcgctatcgaaagtaccgtcaggtcagttttaagtgctgttagattttggcctaattcgtcatgaagttcttgagacaagtactttcgctcattttcttgcacagtcaccatacgtttagcaagttgtttatttttctcaagaagcgctgtgagtttttcgttgctggcttgtagctgattatttttgatctttaattcgttagtggcggttcctattagtaagccagttactgaattagcgaggataaataattggctaatgtaagtattggtcgcatcttgggtgatgccagcttgtgcagcgatcagagcattacttaccacagcacttgctatcgctcctttaataccaaatttataagagagccagattaccggtagaagtgaacaaaggcgtagtaaggggtaaagatctgagtggtttaggtaacttactatataaagaaatgctagtgctaataagcttaataaaataaccgcatgatgacgagaaagcattcggctataactttggctaagtaacaataatgctggggccactaataatgttcccgtcaagtcgcctaatgtcatattaagttgatattgtaatacttgcttaccttctaaccaggttgtgaattcaaaggcgctcgaaaataaaaaccatttaaaagaagctgaaataacagcaagtagaattagcgacaaagcacctgaattagaggtaacttttggcggccagcggcttttcttaaagctgtagacaatagccatataagttaactcttggaagaaaccgtgaaataaatcaaagctccattcgccattataatagacacttaaatacgacgcataaactcgaaaagcaatccaaagcattggccaaaagcgcacaggcaaaataacaaaaaatgcaagcttcactcctgcaggtaggtaaatggcgctactttgggcaacggtttctaaatgattgctcacccaagaggataaatataaggctaaaaagtaaagcgcaaacaccaataactggttaaatacttcagttataaagctatgtgaagaatactttgttgaaacgagcttatgccagttcatcaagtgtgatcatcccggactctatagcaatttttaataattcaaatgaattagtgacttcaagtttgttgtatatattcgttttgtgtacgtgggctgttttgggcatcatatcgagttgttgcgcaacttgtttagcatttagccctttggcaaataagggaagtgcctctttctctcttggcgttaaaaaagaaagtttgcttgcaggggaagtggtattaaacttcacatcttcactgatatagcgccctcctttaataactgaattgaccgcatcaattaaagcttcagatgctgagcgtttagaaacataaccttgagcgccgagctttaaggcgttgctaacgtaaggctcgtagtcatacatagaagcaacaatggtttttatgtcgggaaagtgagtgtttaaataagctagaaatgcgagtccgttttcactgtcatgcattgaaatatctacaataaatacattcggttgctctaagttaacagcaagttttgcctcagtgactgagcaggcttctatgataacttgccacccgctttgtagctctaatagttttttaaagctatctctaaccagttgatgatcttcaatgattccaattcgcataacccctccatagatttttattatatcctcaattcaatgagttatgtctaggaattattcttatataaattaaatacgcgtttatatgccgtgattttaacagcactaagctttaggaacgtttctagtttgaatgctatatcttctgaatcgtggtaattattgatctcggacaaggttgctgcgttgactctgtatgttgcagtgatacagtgaagttgaaccttatttttagtcaaaggagttgcccatgctaggtgaaaaacactcgttgttaaatgagtttccagagtttaatgaattaatccacagtcttgtgaaaactgacgctcattttaaaaaaacgatgcagcgttacgatgatatggataaagaaatccgtgagcttgaattgcaaaactcacccattgaagatgctgacatgcatgaaaagaagcatcaacgtgccgtgctaaaagatgagctttatgactttttaaaagcaaatgcttaataaatcatattaataatgataccccttgcactcagactctcagcaaggggtatttcttgatgtttaaaaccctataaataccgaaatctgcaaaagcaccacagccagaacaatatatgttagccacaacggaaaaataaatttagcccactcaccccaaccaacgcgagctgttgctaggtaggctagtagtgtgcccgaagtgggggtgagaatattcgtgatgccattaccaaataaaaacgccactatcgtggtttgctcagagactcccgctaaactacccacagggcctaaaataggcatactgactgcggcttggcctgacgttgaggggatcaaaaagtccaacaacaattgtgatacaaacatacctgtggcagcaacatacgcattgccttcgccaataaatgacattaaaaagtgcacaatggaatcaagtatcataccttgctttaaaacgacggctacagcagttgctacgccaatcagtatgcttgcaagcagtacttttttcatgccatctacaaatgctttggcggcttgatttgcactaagcccagaaatacaagccagtatcatactaagcgcaatgtaataagcacttaaagcgtgatgtttccaatgccaatgggttgatgcataaactaataatgcaatgcccccagccagtgtgagaagcatagaaacgtggcgtgttgataatttttcggcatgaaagtgaacttgctcgttattaaagccatggcgcttaatcatcaagagtacaaagctaataccaactgctaaaaaagccaggtaaaagaaaaatcgcacacttgcaccactaaatatttgtaagccaagcagtggttgcgcaatagtgagcggcaatgggttagttactgatgatagataaccggctttcacggcaacacagacaatagcaaaaccaatgatattcggtagccctaaacgattggccatgccaaccattaaagggataatcaaaaggtactcagaggctaagcccaaaaaggtgctaccggctgaaaatgcgatcataagaataatcaccagaacataaatattgccttgcactaagctcaatagccgctcaaggcctgcatctaccgtgcctgctttggtcaatatgccaaacataccgccaataataagcaccataaatattaagccagcgccttgctctaacccagtagggatcgctaaaaatgttcctatgaggctcactggctcagcttttatttgatcagcctgttggtagttaaataaattgctaaaagagctatctttcccaattacttggtagctattaggaacaacgatattaccatctctttgatacgaacctgaatcaacgaaataggtaagtagcatggctaggaacaaaatacttagtagtatgatgatcggattcataccctttttactattattcggtgggggcatattcattgttaccttcctatctgcatcgacacataactcgctaattgttgagctacataggcagtatcactcttaaaatgttgataattatcgttcatttcaaatcgttgttcatgcatgtataaagcgcgattaacctctatttgcacagagtggcggttagcagctatatcagcataatgactaactaagtaaccacctttataaggcttgtttttaactactttataacctttatcggcaaaggctttagcaataacgtctacaaactccccgcttgctgaggtgccatcgagatcacctagaataatatcaggacgactcatccctgcatctatattcatcccatttccaatcgacttcatcgaatgacagtcaacatgccaaacaccgttaaactgactatgcaaggcatccaacagtgtctgtagttgttgatgatagggcgtgtaatagtgatgaatacggtgtaatacttctgcttgtgttagcttgcggtcatacatcggcttattgggtaacgcaaaacggcgaattaagcccataccacgctcactgtactttgttggctgacaaatttcccaaggcttatctagtagctcgggatcaatatcagttggtgcgcggttgggatcaatatacatacgcgagaagtgtgcatgtaataagtacccaccttgctctacaacgggttgccaaatatcatcgataaatgcatcccaaccggtttttataaattcaactggcactagtgtattaaaatccgtaggacaatgaataccgctgtgtggtgaatcaaatactaaaggtaaggctgctgtttggcttggggttaataaactgaaagccggctccatagattcttctcctaactacttcataaagttgcctgccactttggcaggcgtcgcgactttcattacagtgagtaagtcagctgtaagtacatataacgccccgttgggttataagtgttttgatcaaagttaatgtttaaattagtcaatgaggctggtggctgtttatcggctaaattattaatccctaatttcaccgctaagttattttcaaactgatagctagcagaaatattgtgataggtgacagagccaatatcgcgtggttcaccagatacttgctcggtcgtcgaaccgatgtaacgcaagttatagttggctgaccatgcatcatgtttccaagtgctagaaaaggtgccgcgtcactcaggataagattcccttgaagcagctgtacctgctaaatcttcacgttcaacagagccatcagacaaggtcgtgtattcggttaattcatttagcttagaaacattggcgttaaacgaccaatcaccataatctgtttgtaagctgtagtaagttacaaagtcgactccagaaacgcgggttgcgtttaggtttactgggccgtctaaaatatcaaggatttcaccactgctgtcacgggtaatggtgtcgcagtttttattttggtaggcacataaatcaaggttgttttgtgcaccaaactcactaatggtgtcgtttatttttatttcgtaccaatctaagctaaagctaaggttttcgattaaattagattcgtaaaccaaaccaacggttttatttatagaggtttcaggcactaactgacggttgccgcccgtggttacttgaacgttagtaaactgttgagtatagccactgggtacaccactacagccgggtaagctggcatctgttgaacacgggtccgatacagcactgtaagtcaaacgctcaccttcaaacagctctaaaatagatggtgctctaaagccttcagcccagtttgcccgtagtgtcagctgctcaaatggggtgtacagtaagcccactttgctattggttgttgagccaaaggtgctgtaatcagagtaacgtgccgctaaactcagttctaggtagtctgcaagtgggagatcagcgagcaatgggatactaaattcagcgtaggcttcttttaaatcgtactcaccaatagtcccttcacgtggcgaagaggtggttgttctgtaggtattaatacgaggatcagcgttgatagtgctatctggcgtgtctttacctttttcttttcggtattcaataccaaatgctgcaccaatataacccgctggtagctcgtaaagggcgccggtaatgttggccgtaaagtcgacttggcttgcttcgtttttgtcgtaaccggtaaagtttacgtaatcgaccatctcgtcggtcagtgggttaaaaacatttactggcacacaacccactgcaatatcagacacatcaccagcaattccgctggtatcgcaggcacgtaaacctagcgctagtttgtctaaatccatttgattattagaggtaaattcgcctttatttttcgcccaagatacaaatgtatcccagctccaatcatcaaatacttcgccttcaagtcccattgcaaagcgtgtcgtttcgaccttttggtcattaacgcgatagccattattcataaaaaacgagctgtgcttaaaatctttgcctgagaattcaacgccaaatggattaacacgcggatcatctgcgattgtaaaaccgcggctgccacgaatagatgaaagagcaggcgaaaattgctgatctgactcacgtaagttataaagtgcttcagctttaaaattcacagagccaaacggcatgacaagctgcgtatataaagatgagcgctcactcggacccgtgacatagttattgtaatagcggttaaaggtgtcatcgctgttgactgctcgccagctatctatactactgccatcactatttggatcgcgggtgatccctgccgatggaattgtaaaatcaacaacatcggctaagttatcttcagcaaaataaccttcaggtgtcgatgccgttaagccattaagtggcactgcagttaacttacggtcttgggtataaattggtttttgatcaacatagcttgcggcaaacatcaggttggcttcgccaatattagtgcctgacaacaaatcaaggctaaaggtttctttatcaccttcagatgtttcaccgtagctggttttgacctctaggccttcgtaatcgttataggtatataagttcacaaccccagcaatcgcatcagcgccataaatcgcagttgcgccgtcttgcaatacttctacacgtttaacaatgttttgaggaatggtattcatgtcaacaaaatcacgaaaaccacgggtaccagcgccatttacccagcgatggccatttactaacactaatgagcgattagcccctaagtttcttaggtttaagcttgatgcgccgtgacttgttccggccgacccattgccatttaggcttgagcctaccgaaggaagctcttgtaatgcctctccgagtgataatgagccatttgcctgaagggcttctaaatcaatgttttgcactgggctcgctgttgcttcttggcgtttaatacgagagccagtaaccgcaattacttcgacgtttttttctgctgatgcttcttctgcgagtacgtattgtgatgtgctcatacaagccgtagcaacagcaagcgatatcattgattgcttaaatcttgaatattccatttgttacactccgagaggttatagttattttgttgttgtcagctaagcactttactcgctcctaaaagctatgcaatattatgaaatatcatcattaagctataacaaattgttatgaatgtatcgacgcaaaacacccaaaaaataaccttaaatagtatggaagcctttgatgcggttatgaaaactggctcagcaacgggggctgcaaaacagctcggactcacacaacccggagttagccgtttgattgctcagcttgaaaataacgttggcttttcattgttttacagagaaaaagcgcgattatttccgaccgatgaagcaattgcattacataaacaaatcgaaatttcgttagccagtgtgtatcgtgttgagcaacttgctaagaacattcatcaatcacatgttggtgagcttaatatcgttgccccgagtagctttgtagcaggcccgttagcagaggcggtggcgtcatttgttaaattacatccgaatgtaaaaattagtttagatagccatagccctgctagagcatgtgagcttgtagcaaataaagccttcgattgtggctttatacagtttcctgaaaatcacgagggattgtggtgtgaacccattgtcaccagccatttagtgtgtgcggtatcaagcagtcatccatttgcagatgcaaagcagctaacagcgcaagatttgcgtgatgagagcttagtgttattaggtcgaggccgtcattcgcgtaagcaaatagagcatgcttttttacaaaataatatccgcgttaatgtacgtgttgaaacgcataccgtgacaacagcctgcaccttggtaaagcacaatgtgggtatatcgatagtgaatgagttgcttgctaagcagtaccaagatgacgcgctgaaattagtgccatttataccaaaaatagaattaacctatgggtttattacgtcggcatcaactcccatgaataggttaaccaacgcgttttacaatcattgcaaagcacatttcgatgaattcgcggctactaactaagctgttgttaatcgcaatatccctttactcaatcaaggttatggtagtcttagcgcgattttttaaggcaacaatggaatagtgctttgcactgactgggattaacatgattaaaaaaaatattattactacttcattagcactaatgggtgttgtcgctgtaggtagcgcacacgctgatgaagggcagtggcaaccgcatcaattaaaacaattacaaagcgagtttgaccgcgttggtattgagttaccggcttcacaagtggcagatcttaaccaatatccactcaatgcagtggttggtttaggctattgctctgcgtcatttgtgtcaccaaaaggcttagcggtaactaatcatcactgtgcttatggcgcgattcaaaataacagcacaccagaaaataacttaattgaaaaaggctttttagcagctgacttgtcaaaagaattaccagcaggcccgcaagagcgtttgtacgtaactgaacaagtggatgatgtaacagatcgcgtactgggtaacttaccagcggatctacacggcaaagaccgttatgaggcgattcaagcaaaccgcaaagccttgatcagtgagtgtgagtcagatcctaactaccgttgtacggtacgtgatttccatcatgggctagagtacttcatgatcaagcaactcatgatcaaagatgtgcgcttagtgtatgccccggcagaagcgctgggtaactttggtggtgacatcgataactttgaatacccacgtcatacggccgattttacctttgtacgtggttatgttggtaaagatggaaaacctgctgattacagcgaagataacgtaccttatgagccaaaatctttcttaaaagtgaataccagcggcgtaagtttaggtgatggcgtgctggtggcaggttatccggggcgtactagccgctataagcttgcagacgaagtaaactattcagcgagttggtattacccaacattgcttaatacttacaacatgacccttgatgtgattgccaagcaaagcaaaggcgatgagcaagcacaggtaaaatacgcctctcgtgtaaaaagcactaacaaccgtttaaagaaactggaaggcttacaagatggctttaaagtaacggatattccgggtattaaagccgcacaagagcaagagtacctcgcttggtttgcacaaagtgctgaacgtaaagcttacgcagattcatatcacgcattaaagtcattattagtagaagcgcacgcacagcaacaaagtcacttttactttgattatgcaaaacgcgcagacttactaagcacggcgattcgtttataccgcttagcaaaagagagcgaaaagcctaatgcagagcgcgaaatgggttaccaagagcgcgaccttcctatgcttaaagcccgtttagagcgcttgcaaaagcaatttacgcctgaggtcgataaagccttatggttaagctacttaggtaactatttagcgcaagataaagcagcccaagttgcggcattaaacgacggcttaggcatcacagataccactacccaagccgagcttgaagcgattattgcgtctttctatgctaaaactgagcttacagatgtagcagcacgcgttaactggattggtaaatctgtggcagagtttgaagcatcaaacgacccattcataaagcttgctgttgccctatacgataccaacatggcacaagaagctgatgaaaaagaaatggccggtcgtttagctgaaattcgcccgcagtatatgcaagcagttatcgccttcaacaacgctaaaggtaagcctgtttatccagatgcaaatggcactttacgcgtaagctatgcacaagttgatggttacccagcagcagatgctgtgtataaaacaccttttacatcactacgtggtttagtagctaaacacacaggtgaaaaaccatttgttgttacagataaagtacttgaagcatataaaaagcaagcgtttggtgcgtactaccgcggtgacttaggtttaccaggtgtcagctgtagtttattcagctttggttgtgagccacaagcggctaaaccacttgaagtaaactcagttcctgtaaactttttaagtagcgctgataccactgggggtaactcaggttcgccagtaatgaatggtaaaggtgaattagtaggccttaattttgactcgacttatgaatcaatcaccaaagattggtactttaacgccaagatcacccgtgcaattcacgttgatattcgatacatgctttggttaatggaagaagttgataacgcaggttacttactagatgaaatgaccttagttaaataacaaagctatgtgaataataaccgcagcaatcgctgcggtttttttatgtctctattttatgccagtctaacgtttttaatttgtttattttcaatacttttgtaatgtacaaagcagatacttttacttgggaaaaataatgagcgccaaacaaataataaaagccatttcagtcagtgttgtggcaataacggcaagctttaatgccagtgcaacgaataccgaagcaatgtggccgggcaccgcttacaatcagcaaattccaacatttaaacaagtgcttgggtacgatgtaggtgagcgcattacaaattacagcgatatgcgtcgttatcttagcgccctagaacaagctgcgcctgatcgtattaaagtgtttaagtacgcaaacagctgggaaggtcgtgaactggtttatgcagttgttggcactgcggatcatattcgctcattagaaaccctcgccaataacacccaagccttggctgatccgcgtattacctctgaaaaagaagctaagtcgctaattaaaaatttaccgacgtctgtgtggcttcagtatgccgtgcacggtaatgaaattagctcaaccgatgctgcattatttactgcatatcacttactcgcagccccgaatgatgctgttaacagcaaaattttagataacacagtggtgtttatcgacccattacaaaaccctgatggccgtgagcgctttgttactcgttattatgcaactgtgggtcttgagcacagcgcagacaggttaagtgcagagcataatgagccatggccaagaggccgaacaaaccattatttgtttgatatgaaccgtgattggttagcgcttactcagcctgaaagtaaaggcagagtggccgcaatcaataaatataaaccgcaagtggtggttgatattcatgaaatgggcggcgaccaatcttactactttgcaccggctgctcagccatttaatccgcatatgacgaaaactcaaatcgctaacatggatgcgattgggcaaaatcacgcgaagtattttgatgagtttggctttgattattttacccgtgaaatttttgatgccttttacccaggctacggtgatagctggcctgttttttatggtgcgtctgcatcaacttacgaagtaggctcagctcgtggtcatgtatttgagaaaaataccggagagctactcacttattttaatactgtaaaacgtcagtttgtggcctcaatttcgactgccgaaggtgctgccaatcagcgtgaaaaactactaggtgatttttaccaatatcaagtcgatgcgatcgattcgggtaaagatagcaaagagcgtgtttatatcttacctaagcaaagtaaccgtgaaggcgctcatagactcgcaaccttaatggctgagcatggtgttgaagttaagcaagcaaccgaagacttcaaagcctgtggcgttaagtataaagcgggtagctattttattgataccgcgcagccgcgtggggtatttgtgcgtaccacctttaccgaccaagtagatatggcagaggcatttgtaaaagagcaagaaagacgccgagctcgtaatctggatgatgaaatttacgatgtaacaggttggtcactgccaatgatgtttaatgttgatagcgatagctgtggtcgtgctgttagcgcagatagtaaagcggttaaggccgacgacacattgcttggcaaagtgaataacccagaagcctcagtagcttatattgttgcttggggtgatacggccgcagcacgctttttaacctcagcactgcaagctggcattaaactgaaaagtgctgaccaagcatttgtattaggtgataaaactaactacccagcgggtagcttagtaatcgaaaagcgcctaaacgataaagacctactcagcaaaattagccaaattgctgagcaaacaggtgcaatagtaaatggtgttgactcaagctgggtgatcgaaggcccaagctttggtagtaacaaaacagtgccaatggtcgcaccaaaagtggcgattgcatgggatgcaccgaccagtgagctaagcgccggtaacacccgttttgttattgaaagacagcttggttaccccgtcacagcgattcgtacgccaatgcttgcatgggctgatttaagtgattaccaagtgcttattttaccagaaggtaattacgagcaagcactcggtaaaccgggcgcggctaatttaaaaagctgggttgatgcaggcggcgtgttgattgccctcggtaatgctaaccgttttaccaccaacgctgattacggtttattggatgttaagcgcgagcaagcttaccgagaagataaagccgacagcagagatgataaaagcagcaaagtggcagggcagttattcacttctcgcgatgatttaaaagcagcgagcattgagccacatacatcgccagactatgtagccggtgtacttgcgaatgttgaagtagaccaagagcattggttaaccgctggggttgataaagaccttgttgcggtagcttacggtaatgacatttacacgcctataaaactgaactcaggtaaaaacttagcctggtttacaggtaaagatgatgtgctagcaagtggttatctatggcagcaaaataaagcacagcttgcgtataagccattgcttgttcaccaaccgcaaggcaaaggcatggtgattggttttacacaatcaccaacttatcgtgcttaccttgaaggtatgaatgtaatgttagctaacacgattttccgcgctgcagcacatgctcagtaaggttaaagtttaaacgaagagcccgccgatgttgcgggtttttttgtgggcaaagttttaaagagtaatgctctaaagggagtgagcaataaaataaaaaagcccgcagggcaaagtgcgggcttttaagttatccaaaaaagaaagtgttaagacacaatccctaatggcttacctgtttgccaagcgccacgggtaaagtctggaatcgttttgctgttacttctatctgcaaccgatgccatgctttgcgggaagatagatgaccatgctgcggcatcgtatacatcttgatcgagtggctcattattgcgtaagcagtagatcatgcgccacagcataatgaagtccataccgccgtggccgccgttcttaaccgcttcttcacccatgcgtctccacagagggtgatcaaattcggcacgccatttttccatatcttgatcccagctatggaagttttgtatatatggcttacggccttgcgaacccgctttttcccatgcagctaactcagcttcatattgtttttgatacacttttgcaatcgctggtggtacatcttcaagggcaatacgattcgggaaaccagcaaaagtaccattagtcccttgaattagattatgacggctgtaagggcgagggctggtggtatcgtgctgtaccataatgctacgacctttcactgttttaataatactggtgttcatatcgccagcaacaaacttaagcgaacgtcgttcgtgacctgctggaaattcacgttcagcataggctgcgcggccaagtgcaggtgaactgactgatgtcacaaagtcaaaacggtcaccacggttgatgttcatatactgggcaaccgggcctaaaccatgggttgggtataagttaccgtttactttggtatgccaataagtacgccatgaaccggtgctacggtcaatctctttcatttgccagcgcagatcatgaatataagctgcttcaccatgcagtaattcaccaaatatacctttgcgaaccatgtttaaaaccattaactcatcgcgaccatagttaacgttttccatcatcatgcagttcttttgagtgcgctctgcggtattaactaactgccagcactcttccatggtggttgctgcaggtacttctacaaaggcatgtttaccgctttccatggtttcaacactcatcggtgtatgccattgccacggtgttgaaatgatcacaatatcaatatcttgtcgagccagcatgtctaaataagctttatcagaaccagtataagccgttggtttaggcaagcctttttcaacaacatagttaactgacttatctaacatcacttgatcggtgtcacaaatagctttaatttcaacaccgtctatatggcaaaggtgtttaacatggccgctaccacgttgaccaacaccaataaaaccaacacgtactacatccatcgctggcacagctaagcccattacgcttttaccttgtgcggccagcgtcggttgttgattgtcaccttgttggcttttcgcacagccagtcacgactgtcgcagcagtgattgctgcggcagattttaagaaactacgtctatcaattgtcataacgatacctaattcactgagattattttttaatatgggtttcagttctttctgttatatctcaacttaaagctaattacaatgaattaggtttcacaaactttcgattttaatctttttagcgaatttatcagggttttattgatttttacccatccataacgtttgctttcttactttcattatctttcgttttattgcgaagtgtttcgttgtgtgataccgtaatttcaaatcacgtatttaacattagtgcaagctgcttggagaaaacaccatgaatgcattgaaaacaattattaacaataaccgagcaggtcaagcgcaggggatttattctgtgtgctgtgcgcacccgctcgtaattgaagctgcgatgctgcaagcaataaaagatgactctgagttattgattgaagcaactgcgaatcaggttaatcaatttggtggctacacgggcatgcagccaaaagactttgttgaatttgttcacgaaattgcagacaaagtaggacttgataaacaccgtattattttgggtggtgaccatctagggcctgtttgctgggttaatgagcctgcagaacaagcaatgcaaaaagccgttgatttagttaaagcttacgcaagtgcgggttttaagaagattcatcttgatgccagtatgccatgtagcgatgatgaagtgtgtttagccgatgctgaaatcgctaagcgtgcagcactaatgtgccaagcagctgagtctgtatgccaagagcaagatattttatatgtggtgggaactgaagttcctccacccggtggtgcaaaagaagatcttgaagtgatcgaagtaacgcatgttgagggtgtacaacaaacgataaagttacatcaagatgcttttaatgaattaaatatcgctgatgtttggtctcgcgtaattgcggttgttgttcaaccgggtgttgaatttgataatcatcaggtttttgattaccaacgaagtgaagcacaacaactgaaagagtttatcacccgtgttgataatcttgtttatgaagctcactcgacagattatcaaccagatcattgttaccacgagttggttcaagatcatttcgctattttgaaagtagggccacagctaacctacgcattacgtgaagggttattcgcattatcgtacattgaagatcaacttattgaaccgtcgcgccgttctaatattcgcgcagtttgcgagcgagttatgctcgaaaagccaggttattggaataagttttatccgactgacgagccagaagcggcaatttatcgtgcatatagctatagtgatcgtattcgttattactggcctgaagatgaaattaagtacgctgtagaaactttatttgcgaacctagaagcgcagatcattccacaaacgttactcagtcaatttatgccaatgcaatataaagcattaatcaaaagagaaattacctcgttaccgcgagagttagtgatcaataaaataatggaagtaacgaatacttattcgcttgcttgtaatcaataagttatgtgagagagaatgaatgatgacgcaatttttatcattagatgtagccgatcttaagcaacaaaatgcttattggacagcaaaagaaataagccagcaaccagaatcatggtgtaatacagctgctattgttgaaaaccaccgtacagaaattaaaaactttttagccccgatccttgcactgaagaaactgcaaattgtattaacaggtgcaggaacatcggcgtatgtgggtgaagcgcttgctcctcacttaactgcaaaaacagaccttgatgtacgtgcaataagtaccactgatattgtttctaatcctttgggttatttgcaaaaaaccacgcctacattgttggtatcttatgcgcgctcgggtaacagccctgaaagtgtcgctgcggttgatttggccgatgaagtgcttgatcaatgttatcacttagtgattacctgtaatgaacaaggggagctggcaaaacgagctaataatcaagagaatagtttttgcctattaatgcctaaagaaacgcttgatgaaagttttgcaatgactagcagcttctcttcaatgctaatttctaccttgtgtatttttacacccgatgtgaatcaattggcgcatttagcaacacaaactgagcagcttattgaaacgcaattgcagagtattaaagcatttgcagattcagatatggaacgactggttattttaggggctggctcgttattaggttatgcaaaagaagctgcattgaaatgtttagagttaactaatggcgacttaatcagctattttgaaacaccacttggttttcgtcatggccctaaaacaattattaatgacaaaacagccgtgttgttaatgtcatcaagtgataagtacagcagcctttatgatacggacctatacaatgagctagttaatgaccagcaatgttcagcggtaaaaaaattaacagtcgatagtgaactggtcgagctagatgatgtttggcaaggcctgtattatattgtctattgtcagatttttgcatttttcaaatcaatttcactcggtttaacacctgacaacccttgtcctacgggcgaagttaaccgtgttgtaaaaggggtaactatttacccattaacttctcgctaagcgacgttgggtagaatatggctgtttatggactcgatattggcggaacgaagatagaaaccgctatttttaatgatattttagagcaacagcagagttggcgaatttcgacgccaactcaaaattatcaggagtttttagaagcaattcatcagcaagtgttaaaggctgatcaactcagtggttgcaaaggggcagttggcattggtatgccaggaatcgtaaatgatgatggtaaagttctatcggcaaacgtgccttgtgcatctggtcgagttattgctaatgacttgcaagcattgttacaacgacctgtcgccatactgaatgacacccgctgttttgctttatctgaagccaatggtggagccggcgaagggtatagccgtgtttttggtgctattgttggcactggcgctgcaggtggcatgtgtattaatggcgagctgttcaatcaagggttaggtatgtcgggtgaatatggtcatttaccactttctgcctatctacaacaaaaataccaactgccggttttaaaatgtggctgtggtttgaatggctgtgttgagagttatatcgcagggccgggtgtgcagacgctttataagcatattactcaatctcctaagtcagcgattgagtgggctaacgatattaagcatggcgatgagcaagcactggccgtgctcgggtgttatttagatattcttggcgagacctttgcggccgtcagtaaaagtcttcatcccgaagttatagtattagggggtggcttatctttaattgatgctatcgttgaaaaactccctgatgcaattcagtcgcacctgttttctggttttacagttccagaggtaaaacgggcaaaatttggtgattctagcggcgtaagaggcgctgcaataataggaagtgttcatgctatttcctcaacatcttgattgttattacttaaaagctgctaaggtgatcacagccgaggcagtgttaaatcatcatgctgtgcttgtaaaacacggtaaaattatggctattactgaagattgcgagtcaggtattgagattattgatttaggggatcagagtatatttccgggctttatcgatttgcatattcatggtcgggaaggctgcgatattatggacggcaccccagaatctctagagaccatttctcgctctttagctaagcacggtgttaccggttttgtcggcacaacagtgaccgcagattgggacgtatcaatacaagcttataaaaatatggcgagtgcctaccaaaaaggcctgactggtgcacagctacttggtgcttataacgaaggattattcttcgctgaagcgcataaaggagcacacaatgagtcattctttttagagcttacaaagcagcgcttcgatgagatttatgctgcttgcgatggctgtttaacctcttttgcattggcgccagagttacttgaatcgcccgacatgatccgctatgtcaccgacaagggagtgcgggtaatgctaggccatactgatgccagttttgatcaaacgacacaagcactagagcatggtgcatgtggtggggtacatatttttaatggtatgcgcggtattcatcatcgtgatcccggttgtaccggtgcactgttgatggacaacgatgcaatggttgagcttattccggatggaattcatttgcatccgagcataatgaacatggtttatcgtttaaaaggggcagataaaatagctcttattacagactgtgtcagcgcgggtggcttacaagatggtcgttatcgattaggtgagcttcctattttggttgagcaaggtgttgcgcgaaccgaaagtggctctttagcaggcagtacattaacgatggaagtgggcgttgaacgtttctataatttaaccgacgcaagcttagttgaagcgactaatatggccagtttagtcccggctgaatttttaaataaagccgactctatcggaagtattgctgtaggaaaagtggcaaattttgctgtgctcgacaacagctttactgttcgtgcaaccatctgtgctggtaagcaaatatacgagaactaacatacacgaatgcaggcaaaagtgtttgatgccattgttattggcagtggtattactggcggctgggctgctaaagaactgaccgaaaaaggccttaacgtgctgttacttgagcgcggcaggcaggttgtgcatggaagcgattatacaacggcttttaaagaagactggcaactgccatttcgtgacagacccagcctgctagaaaagcggaatcaagctaaacaagcgcgcactggctatgctactaagcaatcaataaaacattggtttgtgaatgatttgcagcatccttaccgagaaacgcagcgctttgattggatcagaggctatcatttaggcgggcgttcattaacttggggacgtcagtgtttacgcctcagcgatcttgattttgctgctaacaaacaagatggccacggcattgattggcctgttcgctatcaagatattgcgccttggtacgataaagtcgaagcttacatcggggttattggtgaagcacttaatttaccgcaattacccgatggcccctttttaccgcctttccaactcaatgccgtagagcagcatctaaaacgcagtttattaaatcattataaaaaccgtcatgtaacaatagggcgtgttgcccatttaacacaggcaaaacctgagcaaggtcgtgctccatgcaccaagcgcaaccgctgtatgcgaggttgcccaaccggtagttactttagtagtttagcctcgaccttgcctgctgcactgcgtactgggcgacttaccattcagactcactccattgccaaagagattatttacaacccagaaactaggcaagccacaggtgtgaaagtgattgatgctgaatctaaaaaagagcgtatcgaacgggcgaatattattttttgctgtgcatcaactgtggcaacaacagccttgttattaaattcaacttctgcacgttttcctaatggcttagggaatgacagtggagagcttggtcataacctaatggatcatcattttcgggttggcgccacgggtgagccgaaaggctttgctgatgattataatgatggcgatagacccgttggctttcatatcccacgttttcgaaaccttgatgataaagagcaacataactttattcgtggctatggttatcaagggtacgcgacacgtaaagactggcgacgcggttttaaagagctcagttttggcaaggcctttcgtgaagagcttgccaaaccagggccttggcaagttgctttgataggttttggggaatgtctgccttatcatcataataaaatgagcttagaccctgtattaaaagatgagtgggggctgccattagttaattttgattgtcagtttggtgaaaacgagctgcgtatgcgagaagatatgaaagcacaggcagttgagatgctaacaaaggccggttaccagaacgtgcaaccctatgataagggatctgcaccgggacaagcgatccatgaaatgggcactgcccgtatggggcaagatgctaaaagctctgttcttaatcgctataaccaaattcatagtgtgcgtaatgtctatgttactgatggctcatttatgtgctcatcagcttatcaaaacccttctctaacctatatggcatttactgctagagcggcggatcatgccgttaagcattatcacaatggagtgtttaatggctgatctacaaaggcgacaggctattaaatatttatcggcattattaggtgttgctattacgccagtggccgctactcagttgtttgataaaatggatgacagccattttgaagtgctaaaagaagcggcgcatcgggatgtcgtcaggcagatgcaagcggttattttagagttagaccccgccgaacagctatattttgatttagtggcttttacagatttgatgttggctaacactgtcacggctactgaacggatacagtgtttacaaggcgctgaattaattgcgcagggtaattcctgtgcaccacagctggctaacaaattaaaacgcttgtttgctattagtgaacagcagtatcagcaagtaattgagctgcaaggggtaccgatttcacaggtaactccagctaagcatgaagaatacttaatgtataagtgtatcttcaccgtacgcgagtttttattattagggtattttacatcagagaaaatagcaggctctgcttagtggcatcgcctgcgaacgatttatttacggcaacttgttagcttgtgaccaatcaatgcgtaataaagaataaatccataacaaggtaataataataagtatgcttgctgagcattccctgtaaattctgcaaacacaccatatacaagcggcagtaatgctccaccagaaatccccatgattaatagtgcggcacccgtttgggttttactccccaagtttgccagcgccataggccaaatagtgggccaaaccagcgcatttgataagccaagcagggctacaaataataccgtatcagggaaactgttatcagcgagccaaaatagtaaaatattagagagtgctgtttgttgcgtgtctacaaaaataataccgagtgaaaatacgcagccactcaatgctgagaatagcagggcttgttgctgagtaaaaaagcgcggaataagcacaatccctaatacatagcctagcaccataaaacccatggtgtatgaggtgagttcagcaaactgtagtatgccttgctccttaccatatagacctatggtatcaccggcgataacttctgcaccgatataaaagaataaagcaatcacacctaaaattaagtttggaaattgcaaaatagattgctcttcgctgctactaattgcttgaggttgttcaatatcaggtaatggagcaaacataattaacgcagctaaaattgccagtgaaatcgccatagccatgtaagggctaattaagcggtttgctaattcttgtaattgaagttgtttttgaaggtcactgagttgtgccaaggcttcagggctaaagttggcaatatcactgaacacgatggcagagaaaagtaatggagcaactacacctgcacttttgttcaaaatacccatgatactaatgcgcaccgccgctgtatcttttgaccccagcaacacaatatacgggttagcagctgtttgtagtaaggtcagaccgctccctaatgtaaacaaggcgactaaaaataaccaataggcttgtgtttgtgctgctggtataaataataaggcgcccaaagccatgatggccaagccaaatgacataccatgcttatagctgaatgcctgtaaaattttcgcgctgggtaatgccattaccgtataggcaatataaaataccagtgtgaccatataggcttcgatgtgattgagatcacagaccatttgtaaaaatgggatcaaagagccattaagccaagtaataaagccgaataaaaagaacagtccgccaataatcaccattggaagaagctggctgcgagcgatatattgtggctgagctatgagtgaactttttgttgtcatttttttcaccaaggtggttttttttattcactataaaacaaaattcgtaagttttgaaagttttattttatttcgaaactaattttagctttacaaccgtaaagtgtgtagtattgatgtattactttgaaagcagttttaaaccaacagggcagttatgctaaccacaatcgaaagaagacaaaaaatcgtccttatgactgaagaaaagggcaaagttagtgtgaaagatctggctaaaacctttgatatttcagaggttagtatacgccatgatcttaatgaactaggtaagcgcggcttagtcgtgcgttctcgtggtggggcaatcgcttgcgataagcttgccaaagagctttcggtaaaagataaacataacgaaaactacgcaattaaagttcagctggcgaaagctgttgcaaatttagttgaagatggcgattcattaattattgactcaggtaccaccactgaagaagttgccaaagcactcacaagcaaaaaagcgctaacggtgatgactaatggattgaatattgcgcacgtattagccgatatcgacgatgcaaatgtatttatgctcggtggccaattacgcaagaaatccttgtctttctactccaatgaggttgagcaagcactgagtaaatataacttcaaaaaggttattttaggtgttgatggcatcgattctgaagcggggatcaccactcattacgagcctgaggcaatgttaaatagaaccatgtgtactcgcgcagacaaagtcattgcagtgactgattcgagtaaatttggtaaacgtgccttgtataatgtcctaccgcttaaatcaatagatgttctggttactgacaaaaatatgccaactgaatttgttgaatctttaacaaacctaggcatagaagtgatcatcgtttaatacaaaaacaatagaatactgtaaacatatttctaaaaggcaaccttaggttgccttttttgttgcctagttaatacgattttcttgttcctttcaaaataattaaaaaaaaaccttcctgtagctttcgaaattaaacgtacgccattaaaggcttttgaagcgattaatgactattttaacgcttttttcgtaactatcgaaagtttcactaggtaattatttgttggtagattgtttcattttgttataaattaagtgtgaggccttacttaagtactattttttatagtcaacaaatcagaatattaaaaaaacaggaaatcaccatggcaacaacagctagaaaaacatacctgagcgtattgataagctcgatactggcttcgtcagtcagtttcgcagcctctgcacaacagcaagagaataataacaataaccaagtcgaagaggatgttgaggttattgaggttacagggatacgtagcagcattaaagaatcaaactttcgtaaaagagaagcaacaacggttgttgatgttgtagttgcggacgacattggtaagtttcccgatgaaaacttagctgaagcattacagcgtattcctggtatcaccattacccgtaatggcggcgagggacaaaatattttagtacgtggtttaggtggtggctacaacattaccaccttgaatggccgtaaactggcgtctgaaaattcaggccgcgattttaactttgataccattgcctcagagttagtcggagcactgcaagtttataaatcaccagaagcacgcttaattgaaggggggattggtgcggttgttgatatcgaaactcgcaaaccacttgatcaagacggtttcacgttaagtgcttcagcaaaggggatttatgaatcgcgcacgggagatgtacacccgcatgcttcattcatcataggtgacaactttaatgatgatacctttggtgtgcttttttctggggcctattcaaagaaaaccttacgtgcagacacatactctgcaagcggcttttttgatgaagaagagggctggggagcagacagtgccggtgtgccagtcgatatgaatggtaacggagaaattgacgggcaaagcgaaatatttgcctcaaaaattccgagttacatgtattttgccaacgcgcaagatgtgcgtgaacgcgtcggtgcgacgttagcaatgcaatggcgcccaacagataccctagatattaactttgatgccttatattcgcgttacaacaccgatggtcaccgttatcaaatcggttttgttaactacgacgaaagttggacgccaggcacgcccgtttttaccgatgcacaatttgatgactcaggccgagtggtatcaatgacgcaaaccggtaatactatggtggagttattaaacttaaccaatcctcgaaaaacagatacgtatcagtttgcccttaatgccaaatggtatccaatggatggcctaacactggctgtggatgttgcgcattcaaaagcgaaaaatgaaaatggtggtgataatcgctttattgttgcccgtggttttattgactcgattggcattgattacaccacgggtaatatgctgccagatgttactttatcgccgggcttaacagcggatcaatcatacggtgcgcactatagccgtaatacaggcaccggggttgaagacactatcaatgactttaagtttaccggtacatttttgcctgaaagtgatttagttacccgtatcgattttggcttaacataccttgagcaaaccaagagccaactggaatatgcttcaaaaaatgccagccaatttagtaatgggggccaatacttagatcgcgatggttatgaatttgatgacagcacggtagtaaatgtaggtgactttaacctgtttgaaatcccaagtgacgtgtttgttgaggcgaatttcgataacttcttagaaggtgaaagtagcattacacctgagccatggccaagtttcgattacgataagttacttgcttattatcgttcaattaatgctgaagctacagacaagagcattgttgcctcgcttaattcatcgggtacttatgaggtaaccgaagaagttcttaccgcgtatgcgcaagtgacgcttgaaagcactgttgcaaaaatgccgtatatgctaaatgtcggtattcgtggttcacaaacagaagtgagctctaaagggtcggtgtatgatttatcgttaattgacttacaagaagatggtaaaccacttgaaaatggttggcgcgaaaccgttcagcaatcatttgaaggggattacagcaatattttaccaagcatgaactttaagcttagcattactgatgatttgatttaccgcttctctgcggcacaagttattagtcgtccatcattagcctatttgcgtccatggcttgcgccaaactttgatacttatcgtgaaggcttaccacaactttctatgggtgattcatcgttaacacctgaagaagctaatcaagcagacataaccttagaatggtactttgaagacagcagctcgttaagtggtggggtgtttgtaaaagacctgaaatcatttatcgattatgtagaaagcccagttgaaatcgaaggcgtgcgttattttgcctcttacccgggcaagagtgagtatggtgccactattaaaggcgctgagtttgcttatcagcaatcgctcgaaaatttactacctgagccctttaatggtttaggttttcagcttaactatacctatgtagacagtagctacgatgagccagagctaaaagagtcaggcttgccatttagaggtatgtcgaaaaactcatataacgcggtggtttactatgagcaatatggtttccaagcgcgtttagcctataactggcgtagtaaattcttgtcggatccagatgcgtggggtggcccttattggatctctgattatggtcagttagatgccagcatgagctataacatcagtgatcaattcactgtgtttgctgaagcaacgaacttaacgaatgagcgttattggggttacaccaagcgcactgaccaagtgagttaccttgagcgctttggtactcaggtcgcattaggtgtacgtgctagcttttaatctttgtattcccagttgttagtgttgttcaagcgcctgcacaggcgcttttattttttttaaaaagaggttgttatggcaggaattagtgtttggcaattagtcattattgccgcaattgtggtgctgttatttggcacaaaaaagctctcacgaataggtggtgatttagggacgtcagttaaagggtttaaacgcgctatgcacgataaacccaatgatgaaacttagttagcaataaattttagataatattactgccttgttcggggtcgcgagattgatcagcttgttcgcgtatatcatcggcatcactgctgacatcatctaagctatgatcggtgagtgtttttgatgtttgggtaggcgtgctcgaattactatttatttgctctgtttcggtatttaaaatgattcgctcgcgggcatcatcaggcatactgacttgctctgacaaataggtattgaccaactctcgcatcaattgagatgccactttaactgtgctgtgctcattgctatttacccaaaaataaatagttagatttagtgttgctgagcctaatgaatcaattaacacttggcttggcggatcactaataacagccgggttttgcttaaccactttcattgctaattgctgggcatagcgaatgtcattatcgtaaccaatgccaacgttaaagtgacctcgcattttaggatttgcggtgaggttttttatgacatttttatacacagtcgcattcggtatttgaatgtgattaccatcaaaatcaactaaagttgtggcgcgagccgtcacttttttaaccacccctaaacgaccatcaacttctatcacatcgtcaatacgaaaagggcgctggacactgagcagcatgcttgagataaagttttcggcaatatctcgaaaagcaaaacctaaaataagacccactaatccagtaccactcataatagctacagcaaaatcggtaagtcctgcaaggcgcaaaaataagtacaccccaaacaaaatgataatgatgctaaaaaatcgtcgtgttacaacatgtaatagcttgctttcacttacaaaaccaagcggttttatcaagatatatgacaaagggcgtgctaataaatagcaaataataacagctacgaggcccaacgtaagggctggtaacatttgccaagtagtgtgtaaaaactgcgtaacttgtaggtttaagtcttgccaagcaatgctgtcggtgggtgtctgtgtggtaacaaataatttaggtgaaaccaaactagctaattgatttttatataataaatatagactcattgcaccactccatggatggttgttttgttacagtaagcttagcttagtgcaattcaagcgccataattaatggcaagctgtttgcagctttaaaattaataaagcaatgtattaggtcagatatggctcaagataagcgcggatttcaggcacattcaccgttggagatcccagttagaggctggtgggatattatcaaacgcgtgtatcacaatttatcacaagacaatttatcgtttgtggcggctggggtggcattttatgctttgcttgcgatctttcctgcattagccgcgacagtctctgtttacgcttattttgcgtccccgaccgatatccatgagcaacttgataaagtcactgctattttaccaacaagtagtcgagacattattttgctacaggttgcagaggtgactcagcaatcgcaaaaggtgttaagtgttagtgccatagggactttattgttaacgatttggagtagcagcaagggctgtcaggcgctaataacagcctgtaatatcacttatcatcagcataacaaacgacaattttttatggcgttactggtgcgctttttattttcgctaggtgccattgttgttgcgctggttgccttgttgatcatcggtattttaccgattgtgcttaacctagttggtttaacagagctgattgatttgttgatcaagcttattacttggccactgcttgcgattatttttaattgcgcgttggcattcttatatcgctatgcgccacatcgaacagcagcaaaatggcgctggatcacaccaggttcaatactggctactttgttatggattatcgcatcaattggtttttcatattatgtctcacaatttgcaagttataacgaaacgtatggctcattaggtggtgtagtgattatgttgatgtggctctatatcagcgcatacatcattatttttggtgctgcgattaatgccagcatagaacaacaaactttagtcgatagtactgtgggccccgtgaaagacgttggagagcgaggagcaacagtggctgatagattaaccgaaaaacagcaacagcagaaaaagtaacttaagcatgccatcattgcgcttgttgagtgccaataaatcttagacaaacgtaagtcataaattgactttattaggattgacttctaattagttagttaatcctaaagttttgctttttgtttgccgtggtcagtgatgtgattcttatgcatctataaatcagaaagttaaatttttttgtacaaagctaataatcataatttctaggttttagaatgcaaaaagagctccagtcaaatatcaaaagtttgtcattactcaatttggtcgctgtaatattagcaggattaactgctttatcggtttacttcatgtacgacagtttaaaaaccatagagtctgaaattaaaatgaggtatcgatcttatgttttggcggagcaagtaaggcaaagttcagatcagttaagtttaatggcacgagcatatacggtaacgggtaattcaaaattcttagatttttttaatcaaattctagctattcgaaacggcgaagctcctcggccagaaaattatcaccgtgtttattgggatatgctaatgccacaaagtggtaaggctccatttccggatggtgaaaaaaaagcactcaaagacatgttgagctcaataggtatcactcatgaagaaatgcaacaaattaagcttgctgaaaaagcatcaaatgatttaacaaaaattgaatatgcagcttttcaagccgttgaaaatgaagctgacctttctctaacgaatgagcgggtagcagcgatattaagtttatacagtgacgaatattttacggctaaatcagaaattatgagtcacataaataactttttatttatgctagattatcgaacagagcagcgccttaattcagtgacccgcgagcattatttaatatcgctgttttctttttgctgctttatcacaatcttaatagtgctgttttttatcagccgacttcgaaaatcacttaattatttatatgtctcctcacttgaagctgaagtagcagaaaaaacagcttccttaacagagaaaaatctacagctcgaagaatccatggatttgatggcaaaaactcagaagtacttgatggaagctgaaaaaacagccgctttaggtcgacttgttgttggggtcgcacatgaggtaaatacaccagtcggaatttgtattaccgctgttagttaccttgaagatgaaaataagagaatgggaaaagtgttagctgacaaacgggtaagtaaggggtcgctcgaaaaatacgtacatacctctgaagaaattagcttattacttcattcaaacttagatcgtttagctgagttgatcacaagctttaaacaaatagccgccgatcagcattgtgatgaactaagagttattaaattagatgaccatttaaatgatattgttaagtctttaaagagcgagtctaaacacaaaaacatagaggtggtttctgctattcctgaaggcctgcaagtacagagctttccggggacgctttgccaagtcatgactaatttattatcaaatgcaatttttcatgcctttgatggagactttgacgagcctcgaatagagatctcagctaaaagcgaaggatcagcagtgcttattactgtaaaagataatggcagtggcattgctgaagatattcaagataaaatctttgaccctttctttacgactaaacgcgtgcaaaaaaatactggtttaggtctttacgcagtcatgaacctagtgacccaaaagctaaaaggtacaattactttcgaatccaatgaacagctaggtactactttttatttaactttacctaatctaaatgatgagcaagtttaataacgtgataatagaaacgaacagctaaacattcttttttatagaacgattaacactaattttactcatggttgttagttaaattagcgcctacaatcatttcatacaatttacgggagtaaagttatgaaagtgattcaacaattaaatagccatgctacacaagatggtgatggtgtaaacatcagccgcattcccggctttgacggtaagtatttagacccttttttaatgatcgacgagcttaagtcagatgatcacagtgattttatgggtggttttcctgcgcatcctcaccgtggtatcgaaacctttacgtatattattaaaggtggttttgagcaccaagatcaaatgggcaacaaaaaagcgattcgtgctggtgacgtgcagtggatgagtaccggctttggtgtgatccatagtgaaatgccgttagcagatgccaaagaaggcatgcatggttttcagatttggctcaatatgcccagtgctgagaagctcagagcaccacgttaccaagataccactgaagcgcctgcgccgacgacacgaaatgaacagggtgttgagcttaaagcattagctggaagctggcagtttgccggtgaagagcaggtatcaagccttcaagatcttgctgctaatggcatgctggctgatgtgaccttacctgcaggaactgtatttaaccatgcgcctttagcgcaaaccaaagtgatgctttatgttcatactggtgaaatacacacagagcaaggtggtcctgtaaaagcgggtagcttactcattcttgagcctggtagtgacattgaatttaactcacaaacaggggctggagttttaatccttgctggagaaccactcaatcagccaatcgcgcacatgggtccgtttgtgatgactacccaagctgagttacagcaagcggttcgagattatcagttaggaaaatttggcacactataggaggttattgtgggattacttgtaaacggtcaatggcaagataaatggtacgacaccgataacaaccaaggtgaatttaaacgtgaggcggcccagttacgaaactgggttaccgctgatggtagcgctggtccaagtggtgatgcaggctttaaagctgaaaaagatcgctaccacctttatgtctctttagcctgtccttgggctcatcgcacattgatatttcgccacttaaaggggttagaagattatatcagcgtgtcggttgtaagccctgacatgctagagcatggttggacgtttgataaagataatcacagcaccggtgatgctcttttcaatagcgactttatgcatcaaatttatacgcgtaataaagctgattattcaggccgtgttacggtgcctgtgctttgggataaaaaaacgcagcgtattgttagcaatgaatctgctgaaattatcagaatgttcaatagcgcgtttaatgcactcacaggtaatgagcgcgacttttatcctacagcattacatgctgaaattgacgaaattaatgagtttgtttatcacaacatcaacaacggtgtataccgtgctggctttgcgacaacgcaagaagcttatacagaagccttcgatgatctatttgcagcgcttgataaaattgaacaacgtttaacagaaaaccgttatttagtaggcgatacactcacagaagctgattggcgtttatttactactttaatccgctttgatagcgtttatgttggtcattttaagtgtaacttacgtactatcgagagttatccggcaatcagtaactatctacgtgagttatatcaagttgaagaggtaagtaagacggttgatttttaccatattaaacgtcattactattacagtcatactatgatcaatccaactcaagtcgtgccaaaagggcctgatatagactacgctcgaccacacaaccgtggttaatagacattgataactaacagtttaatgacttgattaaactgttagttataactatccatcaccttgcggatggtgtcgatgccaaacattaccttctgaataaatgattctgagcttttcactaaattaaaattagggtgttgggaccaaacagcttgtagtttgtcatcaagtaatatggcttgttggtcagactcatttcttactgggttattagaatgaatactttgtccagatttagctgcagtttcaaaaaagatcactgcatcatattggttaagttcggtttgtaggttggtatttaagcattgaaaaaattcatcttgctcaccaggccaataggctagtccatctaagctaccacgatcgcaaagcattaaacgatctggatgcatggttcgctgaatatgctctaagtgtttttgtaggttataaatagcctgttggtgagccttgataaggtgaggttcggtgctacgctcaattcctccgccaaataacatggtggcagattcaggaacgacaacaatttgttttgaaaactcgcgtcttagtaaatcgatggctgtagttttaccacctccggggccgccagttaatactatccgttttttcactaataatttccgaaattaatttctgatactttaaggtagtgaaattgcgacttaatgagaagtaaaaactctgattttactgataaagatcataataatctaagaagccaactaaactgactaacttgttttaatttgcttttagattggttattgctttgtaaagcctgataacccatccctgctgtgaaggcgctagcaaggccgactttagtgacagcgaatcgttttaaccgatagttaaatgcttggtgatgctgacgtttaagttcatcttgcatgtccatactatgactaagatcagtgacttttttcagtggttcgcgaataaagtagttaattaacattatttttccttatcaatgttgaataattggcggacacttttaaccgttcgatcaaaaccaattttactactgatatagccaatatttttccaaagccaaaacaaacaaagcagttgcaaaacgatcagcgataaagcgcaaagagcgactgatccacttaaactgaatatggcaatacctattgtggctaacaaaccagcccaaagtaaaactaaaccacctgcaaagcagaccagcatgatgatagttaatgccaaagagcgtgtcgataatcgccactcagctgcagctacctgtttacacaacccagcttgggtacggtaatctacgtaaagttgttcagcatattgcgacaacttggcaaggtgatcttgccactgatcagcatgtaaaggctgatcagtggctgcttgcgacttctcttgtgaatgttgagagtgcggcatgttatttacggcgaataagtgcgctaactaacatacctgcagcaaacgcaatacctgctgttgcaagcggattctcagaagcaagctgacgtgttttgctactgtactcacctagtttctcgcgagcttgagcttgtttctctgaaatagtttgtgctgaatttgatgcgccttcacgaactgaatgctcagctgatgcagcacgagttgacagcgcgtcaactgcatgatgagctgcctcagttgctttttccgtaaatggcgcctctacttcagttggtttcggatttgttttgctgtttgcagtacttgaattcgatttcgacgttgctgtagccatgatcattccttaaaaattgccattattggtattcaataactcgcaacctttataccaattattaaatcatttaatttcagggtgttatatttttagactctgagatcaacataatttctagtaactattgcacagtagttaagtaaaaattacaggctaagaaagatgtacgattcatttgtaactattcattggttattcattaatcatttttccccaattcgtcgccaataaaatagtaaaaaaaatttttttatttgttttccactttttcccacgtaattcagtggctttgcttgaagccttattttttctggctttagaagcctattatgatgatcagcttacttgacaaaaagccttgtcaagccctaaactggagcactgtggtaaaaagtggtttttagtggatcaaattggatcggaaataatcattaacaatttataacctattttaaggctaattatgtttaggggtgcaagctcgctgagtttggatgataaaggacgctttgcggtaccaaccaagtaccgagacgcgatcttgtctgaagatcagggaacggttatttgcacagtcgcactgaatgagccttgtttgtggttatacccactagccgaatggctagaaattgaagaacgattattaaagatctctaacatgaatccacgagcacgccgaatgcaacgtatgttgcttggcaatgctacagagtatcaactagataaaaatggccggattttgcttgctccttctttacgagctcacgcggaacttggaaaaaaaatcatgttggttggcttgatgaataagtttgaaatttgggatgaagatcgttggcatgagcaaatgcgccaagatactgaaattgaacgcttaggtgagtttgaggcaaatcccgaattcgataacttctcgctctaaccacaataataaaaaggcaaaaaatagctaatgacagcgcaatttgaacatgtctctgtactgatggacgaaaccatagacgctttggatattaaacccgaaggcatttatatggatggcacgtttggtcgcggcggacattcaggacaaattcttgcgcgcttaaatgagcatggtcgtttacaagcaattgaccaagatccacaagctattaaagctgctgaaaagtttgcagatgatgcacgtttttcgattgcccatacccgtttttccaaccttaaaacagtcgctgaagacaacgatttaattggcaaagtagacggaattttattagatattggcgtgtcatcaccgcagctagatgatgctgagcgcggctttagcttcatgaaagatggcccgctagatatgcgtatggacccaaccagcggccgcagtgcagcacaatggctagctgaagctgaacttgaagatatcactcatgttattaaaacctatggtgaagaaaagtttggccgccgtatcgctcataaaatcattgagactcgagagcatactccaatcactagtacaaagcagcttgctgatttagttgatgaagctgtaccagtaaaagataaatataaacacccagcaacacgtacattccaagcgatccgaatttatatcaacagcgagttagaagaaattcaaacggcactacaagctgctgttgaagtgcttaagcccggtggtcgattagtggttatttcgtttcactcgttagaagatcgcattgttaagcagtttattaaaaaacagagtaagggagaggcgatacccagaggtctgcctttaactgatgcacaaataaataaaaacctgacgttaaaggcagtgggtaaagccattaagccaagtaaggcggaaattgatgcaaatcctcgttcacgcagctctgtgttaagggttgctaagaggttgtaatgaaagcaaaagcgacgaatcgccaacctaatttatttgttgaagtgtttaaaggtcttgctgctaataagctgaccttagccttgttggttgtgattctcgcgtcgagtttaagtgttgtgcaggtgacgcatttagcgcgtcagcagttgataacacaagatgagttattgcaagaacgtgatgagcttgatctcgagtggcgttacttgcttgtagaagaagagttttattcgcagcatgcgcgcattgaagaaatcgcgaccatgcaattagaaatgaaacggccgactagccaagacgaacaggtggtagtactgcaatgagaagcagagggaaaaagccaactaataccttgatcacatggcgctttatgcttgtgtgctctgtgctgcttttagtctttatgacactggttgcacgtgccgcatttttgcaggttattgagcccgataaagcacgttctgaaagcgataaacgtaccgttcgcgttgaaaaacaacatgtacagcgcggaatgatatttgaccgtaacggcaaagagcttgcggtgagtgtgcctgttgtaagtgtgtatgctgatcccaaggcactgcataaatcattaacgagcaaggtgctgcgtcaagcgcgtaagaatggtgaagatcaaaatgcacttgctgaaaatacggctgaactaaataagcgcatcgctacttattataacaatgacattcgttggcgtgagcttgcggatgtattacgcattgaaccaagtaaaatcaactcccgtcttcgtgataatccaaaacgccgttttgtttatttaaaacgtcaagtaacacctgcagttgcaaactatattggtgatttacgtttaccgggtatccatctgctggatgagtctaaacgttactatccggcaggagaagtgactgcacatgtgattggtttcacaaatatcgatggtcatggtatcgaaggtattgaaaaattatacgaaaaatcgttaaccggtgttgaaggacaaagaacaatacgtaaagacgctcaaggccgagaggtcgaagtgcttgatgagcgtgaacgtgttgaaccagaaaatatccatttaagtatcgatcaacgtattcaagcgattgcctacaaggcgataaaatcggctgtgctgacatataaagcaacctcgggctcagctatggtcgtggatgtaaaaacaggcgaagtattggctatggtaaatagcccatcttttaacccaaacaatcttaatgatgctgctccacataagcgtcgaaatcgagcaataactgatttgtttgagccaggctcaactgttaagccgctagccattttagctggtttagactacggctcaattcaaccggattcaattgttgatacttaccctggctggatgcgtgttggtggcagccttgtccaagatacgcgtaaccatggtgaaatgacattaagagaaatcttaaaatactcaagtaacatgggtgtgactaaagttagccaagacttaccaaaagactattttgtcgggctttatcaaaaagtcggatttggtagtgatagtggaacaggcatggtcggtgaaagtagcggcttgttttaccctaatcgtcgttggtcagatcatgaaatagcagcattatcatttggctataacttagctgtgagcaccgcacaaatggcacgtttttatgccatgttaggttctggtggcgtgatgcgtcctcttactgtacttaagcaagagtcagtgcctgaaggtgagcgcatttttcagcaaaaagatgttgaagccgtcgtccatatgatggaaagcgtgtttgaaaaaggcggtacggcacaaaaagttcacgtcgatggttatcgcgcagctggcaagacaggtacctctaaaaaagccgctgtaggtggttatggtgatgagtatgtcggctactttgctggtgttgcaccggcaagcaatccacgtttagcggtagtagtattgatcaatgagccgggtggagatgtttattatggcggtgcgacggcaggccctgcatttgcagagattgtctccaatgccttaagaattttaaacgtcgcaccggataaagatgcggttgcgtacgtagaaggcaaagataacgatgcgtgatttaaaaccaattctgagtcaaattgaagttgaggccactagtttgctggtcaatcaactacgtcttgatagccgagacgtaaaaacaggcgatgtttttgtagctgttaaaggccatcaactagatggcggacaatttatagataaagccatagaaaatggcgctgtagcagtcattgctgataggttatgcgaatttgaaagtgattttgaatcgctttacttggtcacagacctcgctaagaaactacctgctttagctgctgcgttttatcatcagccgtcagagcaattagatctggttggcgttactggaacaaatggtaaatcaaccacaactgcgatgatcgcgcatttagcacagcaatgtcataaatcagcagcggtggtggggacgcttggctatgggcatccagagcaattaactccattagtaaataccacaccatcaagtgttgatttgcagcgaattttgtttgaattacatgaacagcacaccgatgttgttgcaatggaagtttcatcacatggccttgtgcaacagcgtgttgaccattgtcagtttaaagcagccgtttttactaatttatctcgcgaccatttagattatcatggcactatggatgcctatggtgatgcaaagctgatgttgatgcgtgatcacaatcctgagattgtggttctcaatcaagatgatacacaagttgagcagtggttagaaaaatacgactttaacaacttaatttgctacggccataaaaacttagcaccagaaggtgcgcgctatgtttactttagcgatgttgtttatagcaacaccgggatttcggcaacattcgaaacaagctggggtcaagcacaggtgcagtctgcattatttggtgagtttaacttgtataatctggctgcggcgatggccactctacttggtatggggtatccgctggcacagttagttgctgcctgcaaaacactgcaaccagtggctggtcgtatgcaagcgtttagcgtaccagggcagccaacctgtattgttgattacgcgcatacacccgatgcgttggctttagcattacaggctttacaaaagcatgtacctggaggcgtaagctgtgtgtttggctgtggtggtgaccgtgataaaggcaagcggccaatgatggcaaaagctgctgaaggcaacgcagaccgtattattattactagcgataatccgcgcagtgaagaccctaatgccattattgctgatgtggtggcaggtcttgagcatgctgaaaaagcccattgtgaagctgatcgcgctaaagcaattagttatgcaatagagcaggccggtgctgatgatgtggttttaattgccggtaaaggccatgaagattatcaaattattggcgatacacgaatcgacttctgcgatcgccaatatgtacaacaacaattaaaagaaaaatcgcaaggggcgcagttatgatccctatggattttgattggctagcaaaagttctagcaactgattaccaaggtggtaatcaaacggtaaaaaatattaacaccgacacccgtactctgtgcgagggtgaagtgtttttagcgctacaagggcctaactttgatggtcataaatttgttgcgcaagcaaaagagaaaggggcgattgcagctattgtagcgcgtcctgttaatgttgatattgtgcagtttgtggtgagtgacacacgtatagcgctaggccaaattggcgcagctgtgatggcacaggttgcaccaaaaacaatcgctattacaggtagtgtgggtaaaaccactgtaaaagaaatgtgcgcggcgattttatcaggtcatggtgaagtactggcaaccaaaggtaactttaataatgacattggtgtacctctgaccttgttacgccttgagccacagcatcaatatgcggtaattgaattaggcgccaatcacattggtgaaatagcttacacagtcgcgatgactaaacctgatgttgctgtggtttgtaatgtggctgaatctcatttagagggatttggatcattacaaggtgtggctaccgcaaaaggcgaaatctacgatggcctaaaacctgacggtgttgcaatcgttaacagcgacagtgattttgcagattactggctcgaaaaactaactgatcgcaatgtaaaacgtttttctactcagcaaaaactagattattgggcagaagatgtggtgcttgatgagcaagcgcgtgcgtcttttgtgctttgcagtaaacagcaaaaagttcctgttactctcgcattaccgggcaagcataatattgctaatgcattaatagcgacagcattaaccactgagctgggtgtaagcctagaaagtgttgctaaggcattggctggcatgggagaagtcaaaggtcgtgtcaatgtacttaaagtatcagacactctaaccgtaattgatgatacttataatgccaatgtgcagtcagtaaaagcggcgattgatttattaagcgacatgccgggacgtcgaatttttgcgttaggtgatatgggcgaacttggcgaagaagcccgcttttatcatcagcaagtaggcgaatatgcaaaacaaaaaggcattgatgagctatacagcctaggtgtattaagcaagtcggccagtgatgtatttgaaaaaccaaatcgtcacttctcgaaccgtgaacaactattacaacaattacaaagtgtgcttactgaatctcagcaaaagaccacccttgtagtaaaaggatcgcgcagttctcgtatggaactagtggtagcagatttagttaatagccagcaagatggcaacaatggagtatcgtcatgttagtttggctggcagagtatttaacacaatattatagtggctttaatgttttttcttaccttacgctgcgtgcgattttaggtattttaactgcgctgcttatctctctttattttggtcctaagcttattcgtggcctacaaaaaatgcaaattggtcaggtggtacgtcacgacggccccgaatctcacctatctaaaaaaggtacgcctaccatgggtggcattttgattttaggggcgatttttaccagtacattactgtgggctgacctttcaaacaaatatgtatgggcaaccttatttgtggtggggtcattaggtgtagttggctttattgatgactaccgtaaagtgatccgcaaagaccctaaaggcctaattgcgaagtggaaatacttttggcaatcagtgattgcattagtggttgccagtgcgctttattttacttcgcaacaaggcagtgaaacctcgttagttgtgccgttttttaaagatgtgttaccacagctagggctgttttatatcgtgatgacctattttgtaattgtaggtacttcgaatgcggtaaacctaacggatggccttgatggtttagcaattgtgccaaccattttggttgctgcggcgcttgctattattgcttacttaaccggtaacgttaacttctcaagctacttacatattccgcatttgccattagcaagcgaacttgtggttgtatgtactgccatagttggcgcaggactgggtttcttgtggtttaacacttacccagcacaggtatttatgggtgatgtaggctcattagcactcggtggtgcactgggtattattgcggtgcttgttcgtcaagaactggtacttatcatcatgggtggtgtgtttgtaatggaagcattatcggtgattttacaagtaggctcttataaattacgtggtcaacgtatttttagaatggcgcctattcaccatcattatgaattaaagggttggcctgagccgcgcgtaattgtgcgcttttggattatttcaatcgtgctagttcttgctggccttgcgacattaaagatcaggtaaatgacagttattaacgagataaaaaacaaacaaatctcagtgctcggactcggtgtaaccggtctgggcattgtgcgttttttattgtctcagaatattaaaccaattgttgttgatagccgcatggcgccgccgggtgcggattggctaaacgagcatgccagcgagttaactacgttctttggtgatttagaacaggcagacttagccagcaatgacattattatcatcagccctggtctaagccttgctacaccggctgttgcaaaggccattgctgcgggcgttgaagtgattggtgacgttgagctttttgcccgtttaaccgataaaccaattgttgcggtaacaggttcaaatggtaagtcgacagtggttaccttggcgtttgaagtactgaaagccgctggttataaagtagggcttggcggtaatattggcacagcagtacttgatttattgtcgcaagattacgacgtttatgtacttgagctatcgagttttcagcttgataccacgcacagcttaaaagcgaaaagtgcctgtgtattgaatgttagcgaagatcaccttgatcgctactcaagttaccaagcatacattgactcaaagcaaagtatttataacggctcagagcttgctgttgtgaatgccattgatgtagcaacccatacagcaaagcaaccacaagtaagctttgcacttgcaaatgcagactttgccttagtagagcatcaaggtgagacgtactttgcagcacaaggtaaacctgtgttacctgcaagctgtttgaaagttgttggctcacacaatcaacaaaatgcactagcagttatggcgctactaagcccgtttagcatttctacagagcattatcagcaagcgtttagtacgtttactgggcttgcacaccgttgtcagtttgtcgctgaaattaatgaagtgaaatactttaatgattcaaaagcgaccaacgttggcgcaaccatcgctgctattgaaagcttagctgatcaagcaaagcaattagttgtgattgctggcggtgatgcaaaaggggctgatttagatgccttgaaaccctatttgaatgacaaagtgaaagctcttatttgttttggtaaagatgctaaagcactggtgtcattaactgaaaaaggtcatttaaccacgaatatgcatgaagctgtgcaattggcaaagcagttaagtagtagcggtgacatcgtattgcttgctcctgcgtgcgccagcattgatatgtataacaactatatgcaacgtggtgatgactttgcgcagtgcgtattggcggaggcaatatgatcgcatttgccgacattcgtgaagcattaacccctaagcaatcgccacagctttatgatgtgccgttgttgtattgtatgttgatgttgataggtgttggttttgtgatggttacaagtgcctcaatgccaaccgcagagcgattatttgataatccgtatcacattattattcgccatagcatgtttttaatcatgggcttttttctattttggattgccacaagtgtgcctatggactggtggaaacgcagtaatgcctatttattgttattgggtttaggtttactggtgttggtacttatagttggccgcgaagtgaatggtgcaaaacgttggatccccataggccctgtaggttttcaggtggcagaagccgctaagttattcttttttagttatattgccggctatttagttcgtaagcgcgaagaagtacaagaaaatctaaaaggcttttttaagccactcgttgtctttggtgtttatgcattgcttattttaatgcaaccagatttaggtactgttgttgtactttttgttaccactgtcggtttattatttttagccggtgctaagttatggcagttttttggactgatcttaacgggcattgcagccattgtggtgctaattatcgctgaaccataccgtatggcccgtgtaactggctttttagagccatgggaagatccgtttggtaaagggtatcagttagtacaatcactaatggcctacagtcaaggcggttggtttggccaaggcttggggaatagcgtacaaaaacttcaatatctaccagaggcgcataatgacttcatctttgccgtaattggtgaagagcttggcttttttggtgtgctgagcattttgatagtactaggtgtattcgtatttagagccttgctaattggtcaaaaagccttgaagtgtggcaaagagtacgaaggctattttgcctttgcaataggcatctggtttgcgtttcaaaccatggttaatgttggcgcaagtgccggaatattacctacaaaaggcttaacattaccgtttatttcttacggtggttctagcttattaattatgaccatagcaacaggtgtacttttgcggatcgattttgaaacaaaaatggcgacgaagcaggcaacctcacgtggaggtaaaagatgagtaaaaagttacttgttgttgcaggcggtactggcggacatatttttccgggtattgccgtcgctgattttttaaagcagcaaggctggcaggtcagctggattggcacgcctgacagaatggaagcgacagtggtacctaagcaccacattgatattgacttcattaatgtcaaaggggttcgtggtaacggtattaaacgcttgattaaagccccgtttatggtgatgaatgctatttttcaagcgcgtaaaattttaaaagcacaaaagcctgatgtggtgcttgctatgggtggttatgtgaccggacctactggaattgcagctaaaagcttaggcattcctttggttattcatgagcagaatgcagttgcaggcatgagtaaccgctggttagcaaagtttgccaataaagtgcttgccgcttttccatctgcttttgcaaaagaacactgtgaagtggtgggtaatccggtcagagcaagtgttgcaaatgttactgctaaacagacgactacgccgattaatgtgcttgtggtgggtggttcgttgggcgcgcagatactcaatgagactttacctgctgtattcagtgaactttcagcgctaacaacgcttaatatatggcatcaaacgggtaaaaataatgaaccgaatgtgactgccagctatcaacagttaggactagctgaaaatagcaaagttgctgaattcattgatgatatggatagtgcatatcagtgggccgatttggtaatttgccgcgctggtgcgctaacggttagtgagattgccgcagcgggtcgaatggcgttatttgtgccttttccacatgcagtggatgaccaccaaacggccaatgcaaagtatttagtgactgagcaagccgcgctgattatgcagcaaagtgagtttaataaaacagcggttgttgaattactaacaccgtatgtaaacgcaccagagaaaatttcaacaatggcaagtaaagcaaaacagcttgctattttagatgccacagccaatgttgccaaacgctgtgagcaactagcagatagaagagattagtagtgaaagaaagcacgaagaaagaaaacaacactcgtcctgcgatgcgtcgtatcgacaccatccactttgttggtattggtggtgcaggcatgggtggaattgccgaagtacttgcttttgaaggctaccgcatcacgggttctgacattgcgcacagtgcgatgactgaacgcttaattcaagtgggtgcagaagtatttattggtcatgacgaaaacaacgtaaaagatgccagtgttgtggtggtatcaagtgctattaatgagcaaaaccctgagattaaagcagctaaagcggcgcgaattcctattgttcgccgcgcagaaatgcttgctgaattaatgcgttttcgccacggtatcgcagtggccggcacccatggtaaaaccacaacaaccagtttaattgccagcatttatgcacaagccggtcttgatccaacctttattattggtggcttgttaaacagtgctggtagtaatgccaaggtcggtaaaagcgacttcttaattgctgaagccgatgagagtgatgcgtcattcttacacttacagcctatggtttcggtgatcacaaacattgaagaagatcacatggatacttacggcggcagcttagaaaaaatgaaagacacctatgttgatttcattcataacttaccgttttatggtttagctgtcgtgtgtattgactctgaagttgcggcagagcttattccgcgttttggacgccctgttattacctatggtgaatcggctgaagctgattatcgcatgcttgattttagtcaaactgcgaatacttgttcatttaacgtagtaaataaacaaggcgaaagcttagctgtaacgcttaatatgcctggtaagcacaatgcacttaacgcgacagcggcgattgcagtggcaaaagatcaaaacattgccaaccacgccattttagaagcgttaacaaagtttgaaggggtaggccgtcgttttcagcattacggtacctttgaaaatgagcgtggcagcgtgatgctagttgatgactatggacaccatccatcagaagtagcagcaacgattgcagcggttcgtgagggctggccagataaacgtttagtgatggtttatcagcctcaccgttatagccgtactcgtgatttatacgaggagtttgtcaaagtactggctgacgttgatcagttattactgttagatgtgtattcagcaggtgaagagcctattgtgggagctgatagtaagagtttatgccgtagtttacgccaacgaggtaaagagccattacatatcgctagcagctctgagcttgcgggtgttcttgcagataccctgcaagataatgatttagttttaacacaaggcgctggtaacataggccagttagtgaaaaagttagcagcaaccaacttgtcagttgaacaactaaagcaggtaaatatatgagccagttaagcgacaaatttggcaaagtagcggtactttttggtggcacatctgccgaacgagatgtctcgctaaaatcaggccaagccgtattgaacgctttgcaaagcgttggcgttgacgccattgcttttgatccaaaagataactcattatggcaattaaaggatttaaatatagagcgcgtatttattgcgcttcatggtcgtggtggtgaagatggcaccattcagggcgcacttgaatttatgggtattccgtataccggtagtgacgtacttggctctgcgcttgcgatggacaaagttcgctgtaagcacttgtttaaagcaatgggcctgagcactgcaccatatactgttgttgatagccgttatgaatttgatagccaagcaattattaatgaatttggcaaagtgatggtaaaaccgtcacatgaaggctcaagcattggtatggcagaagcaagcagtgcagaacagctagatgccgctttaaacgctgcatttaagtttgatagtcaagtgttggtagagcagtggatcacagggcgtgaatttactgtagcggtacttggtcaagatgttcagcctgttattgagatgaccacgccaaatggtttttatgactaccaagctaagtatcaatcgaacacaactcagtatcattgcccagctgatttatcagtacaagagactgagttattgcaaggtatggcattaaaagcatttgatttagtcggtgcaagtggttggggtcgtgttgatgcaatgcgtgatcagcaaggtaacttctatttattagaggttaatactgtgccaggaatgacagaaaagtcgttagtacctatggcggcaaaagcaaacggtgctagctttgaacaattagtggttcgcattttggagcaaacgctttaatatgcatccggttttagaaaaagcaaagcagttaaaacaacaacttaattggtcgttgatatttggtgtgagcttttttttagtcgtggtttttggtctagtaaaaatcacgacaggtgtgtctgactggttagttgaaaataaagatgcgcaaataaagcatttatctgtattaggacaacctaaatatacagatgaaaaagcgattattggcgcaataaaaaaagcggatttatcgagtttttttgaattagacgtgaaacatgtgcaacgcttggtacaaagtttaccttgggttgcgacagcttcagtaagaaagcaatggccagatactctgcaagtatacgtagtagagcatcaagcagttgcgcactggaacagtggagcgcttttaaatcaatcaggtgaggtatttgaagcaactagcgataaactacctgatacacttcctcagctttatggcccagagggaagtgaaattgaagcctggacagcatttcgtcaatttcaagaaatgcttaaggtcaataatttagagctgacaagtttagcgctttcagagcgcttttcatggcagttatggcttgataacggcattcgcctgaatttaggtcgtaaagaaaaagcaaagcgtgtacagcgttttattgatgtgtatccgcgcatggaacaacgtgcagatgcacaaattgatgttgttgatttacggtacgataccggtcttgcagtgagctggaagccacttcaagaagagcaattagaaaataagagtaaggcatgactaagtcagcagaaagaaacctagtgattggattagacgttggcacatcaaaagtagtagccaccgttggtgagatcaccgcagataataaactcagtattgtgggtgttggcagccaagtatcgcatggtatggataaaggcggcgttaacgaccttaaccttgtttctgaatcgattcgtcgtgctattgacgaagcggagttgatggctgattgccgtatcagctctgtttacttaggtatatctggtaaacatattcaatgtcagaatgaaagcggtgtggttgcaatcaataacactgaagtgactgatgaagacatcgagaatgtaattcatatcgcgcgttcagtgcctatttcggctgaacgcaaaatgttacatgctctgccacaagaatacagcatcgacatgcaagaggggattaaaaacccattaggtatgagcggtgtacgtatggaagcccgtgcacacattattacttgctcgaacgatatggcaaagaatattgaaaagtgtgttgaacgttgtggccttgaagtcgatcagttgatctttacggctctggcatcatgttactcagtactaacggatgatgaaaaagagttaggtgtcgctgtattagatattggcggtggtacaatggacatcactatttatatcaatggtgcgctgcgtcattcggctgttattccggttgctggtaaccaagtgactggtgatattgcaaaaatatttagaacacctatatcacatgcagagtcactcaaagtacaatacgcatgtgcaagcagccaaatggcaagcaatgaagacactattgaagtaccaagtgtaggtggacgtccagcgcgaatcatgtcgcgtcatactttatctgaggttgttgaacctcgttttagagaattatttgagttggcgatggaagaaatacgccgctcaggtttagaagaccagattgctgcaggtctcgtcattacaggcggaacagcaaaaatgactggcgcaatggaagtggcagaagacattttccaaatgccggtcagaattggcaaaccaatcgggattgttggtttgacagattatgtagatgatccttcgtacgcgaccgcggttggtttgttacaatacggccgtacaatgcaatcgatgaatgcacaaaagtcgaaagcggaaggtgataataattggtggaaccgtattactaaatggttccaaggtgagttttaagactcaagtcggagagtaaacatgtttgatatgatggaacagcacagcgaagaagctgtcattaaagtaattggtgtgggcggtggcggcggtaacgctgttgagcacatggtaaaacaacaaattgaaggcgtacgtttcattgctgcgaatacggatgcacaagcattacgtaattcgtcggctgatgtaactgtacagctaggcacacaaatcacctcaggtttaggtgcgggtgcgaaccctgaagtaggtcgaaactcagcagaagaagacgctgagacaattcgtgccagccttgaaggtgctgacatggtatttatcgctgcaggtatgggcggtggtacaggtaccggtgctgcaccagtggttgctaaaattgctaaagagttaggtattttaacggttgctgtagtaactcgtccgtttgactttgaaggtaagaaacgcgcggcagcagctgaacaaggcattaatgagttgtcagaaattgtagactcgcttattacaattccgaacaataaattgcttaaagttttaggtaaaggcactacactattagatgccttcgcaaaagcaaacgacgttttatttggtgcggtacaaggtattgcagagctaatcacacgttcaggtctgatcaacgtggatttcgccgacgtacgtacagttatgtcagcgatgggcactgcaatgatgggcactgcatcagcgtctggtcctgaccgtgcacaagaagcggcagaagcagctatttcaagcccattacttgaagatgtcgatttaaccggtgctaaaggtatcctggttaatatcactgcaggtatggatattgcgattgaagaatttgaaattgtaggtaatcacgttaaggcacttgcatcagaaaacgcaacagtggttgttggtgcggtaattgaccctgaaatgagtgatgaactacgcgtaacagttgttgcaacaggtttaggcggcgatcgtcgtccacagtttggaattgttgataatggctttaagaaagcatcaggctctgatgtacatagctcaatgaaccaaacgactagcagcatgtatgtaccaagctttgcaagtcaaggcagcagcgatgatgtaagcatgtctgctgcgcctgaaaagcaagagccagtacaacaaagtacagcgagcagctcagtatctagcagcactgagagcagcaaaaagtctgataaatcagaaggtggcgattatttcgacattcctgctttcctaagaaagcaagctgactaagacagattttgttggtaattttgttcgataaataaacaaattggcagctgaatgtatttatgatacaatttgccgtctaactgtaactataagtgagcgaacctatgattaaacagcgtacgattgcagaagtagtcaaagccataggaattggacttcataaaggtgagaaggtcactattactctccgacctgcgagcgcaaatactgggattgtatttcgtcgcgtagaccttgatccggttgttgattttgaaacaacacctgaagccgttggtgatacgcaattgtgtacctgtttaacaaacaaagatggcgttcgcttatcaacgactgagcaccttattgcggcggtagcggcaatgggtattgataatctaattgttgaattagacagctcagaagtacctattatggatggtagtgcattaccattcatctatttgttacaaaaaggcggtattaaagaagtaaatgcagctaagcgctttattcgtattaaagaaaaagtacgtattgaagaaggcgataaatgggctgagatagaaccatacgatggtttccacatcgattttgaaattgcgtttgatcaccctgcaatcaatgaaagccgccaacgtatcggtttagatattacgacgcaaagcttcacagaagaaatcagccgcgcacgtactttcggctttatgaaagatatcgagtatatgcacgctaacaacctagcattaggtggtagcatggataacgcagttgtattggatgagtttaaagtactaaatccaaatggcttacgttatagcgatgagtttgttaaacacaaaatcttagactgtgtgggcgacatgtttatgactggccacaacattctaggtaaaatcacggcttataaatcaggccatgatttaaacaataaactacttcgtaaaattatggcgactgagtcagcatgggaatgggcaacattcgataccccagtgactatgccagcaccaggcttagaagtagcgacagcttaatcgcaagcatattacagttataaaaaatgacgctttaagcgtcattttttttgtttagcttataagcctagaatcgcttcaagctcgaccaactgattgatttgataagttggtttaatatcttctggtaactcaaccccaggatgttgcaaccagcaagtgtcgataccaacattatgaccgcctaaaatatcgctagcagcggtatcacccaccattaaaatctgctcttttggtggattacccattaattggaaagtatgctgaaaaatttctggagcaggtttggctttaccgactaactctgaaataaccagccaatcgaacatatcctgtaaacctgtatgctctaaacgcttttgctgtagtttagcaaagccattggtaataatgcctaacttggcgtgtggctttaatttagtcagtagttcaaccgcaccaggaagtggcacacaaatagaggccatagcgtctaaaaagccatcatttaaggtttttgctggcacatctagtttattagcccactctgtaaagcgggtgatctgtagctcactggcagtaatttcgtgcttttgataagcaacccaaagcggtttattagttgcttggtaatgatgataatctgactcagtaaattctacgccataattggcaaacattaccctgaggccttcaaatgcattaaaactaaatagtgtttcgtcggcatcgaataatacgtggctatacttcatggttatcctaattactgattaaacagggtagggtgtaaaaatggtgccattgcaagcgttagcgcttgtacataagtactttcgcgtgtcgctaagtgattggtcaataaaccaatagcgccaccttgctgcttgatattaacagtattgaatgcatcatccattacatctcccagctctttaccggccagtaaggcatcataaaaaggttgaggtaaaggtaggttgctactgcggccaacgctaaattgctgctggtttgcaatcaccacaaaggcaaaggttgctgcgccataactaaattgttctgcgcctccctccattgcggcataaaagtcggcatcaaagtggttttggcaatacttaacacggttttcagcgccgatacgggtttcatcttcacctagtggctgatcaggcacacccgatggtgcatgctcacctttgcattcaatggtatattctgggaaataaagactaaagacatgtttagccgcgttaatttttacagggttctttgaaccgacaataacacgtaatgtttttttcaagctggcgactccattatttcggttgagccagcagtgtacccgagtgagttaaatcggcaagtcaactggggctaaattttcaagtgcgcgctttttcaaaataatatctttgatcaacggtgttaagaccaattccattgcaaggcccattttaccgcccggcacaacaagcgtgtttatgcgtgacataaaactgccttcaatcatgcgcaaataataggggaaatctacgtcttctatgcctcgaaaacggatcacaacaaaactttcatcaagagaaggaatatcttttgcactgaacgggttagaggtatcaaccgttggcacccgttggaagtttatatgtgttcgtgaaaactgaggggtaatatggttaatgtaatcatccatactgcgcacaattgagcccatgacagcttcgcgcgaatgacctcgttcagaggtatcgcggatcaatttttggatccactcaaggttgataattggcaccatgccaattaacaggtcaacatgtttggcaacatcatgattttcatcaacagcaccgccatgcagaccttcataaaacaacatatcggtattgggtgctaagtcttgccaaggcgtaaaagtccccggcaattggttataaggaactgcttcatcaaaggtatgtaggtagcgccttatttttccttggccggtttcaccataatgataaaaaagctcctcaagggcaccaaaatcgttagcttctcggccaaaatagctaatatgcttgccttcttgttgtgcttcacggacctttttatccatttctggacgtgtataacgatgaaagctatctccttcaataaaggctgcatcaatatctaagcttctaaaaatatgcttaatggcattggttgtggtggtggtgccagcaccagatgagcctgtaattgcgatgatagggtgtttagctgacataattattctcgttatttgttgataccaatcgacttaaatactgaaacattctagcgcgcagaatggtcagtaacttaacacgattggtgtagcgtgcataaaatcaatcagtcgaaactgataaaaaacgaacactccctagttataaaggtcgagcatggtaaggtcaagtgactgtcagattaattagcgctatcatggcatataaaaattaaaagagagaaccctatgaaattgatttcgtctttacttttcgtcgccgcagggacattttttactagtcacgtaaatgctgcgatgccaaaaagcgaaatactacttgctgattttgatactccttacggtatgaaagtctcgcggataaccgataataaaagttacaacaatcagccatttttagttgattcagggctgtattacacccatgaggttattgctgaaactggacagtcacaaacagatattgtgttttataactttgctacaaaaactagcgtgaatataaccaatacggctgttagtgaatattcaccaactctaatgccaaatcagcaggctctctcagcaatcgttgtcgaagaagatggcaaacaaaagttatggcaatatccgcttgctaatgagcaaactgcaagccgtatttttgaatggattgaaccagttggctaccatgcatggggcgctgaaaacgacctaattatgtttattttaggtgaaccacataccttgcagtacacgagtattgcagccgctaaaccgcgagtaattgcagctgatattggccgtacgttagtttttgataaacacacaaacagttatttatttagttataacaaagataatcaacattgggttgcacgctttgcgccgcaaactgaagaggtcagtgacttatttaggttacctgactctgtgcaagattttgctttaattgatcaaaacactttggcatatgcggttaataaccgaatttacaagcgcagcctaacagagcctgaagtggtatcacaatggcttgatttaaggcgtttttgtgaaggatcaatttcgcgtttaaattataaacataacaaactggcatttgtgtgtaataaatgagtaacggttttacactgattgctgtactgtgactaataattaacgctattcataagggacgcatttgtctttttctgccgaacaacttagtgtgcagctggttaaagcgggctgtcgcagtaattttaaaattaagaatattaacgaatttatgccagcaaacttaaaagaagctttttatgttcatgagcaaggtggccaagctaaaatcgttattagaccaatttttgaagtatttagtgctgactttgatgctatcgaaggtattacgcgtgttaaagactattttcacagcagtgaaatgacacgctttccaacgcgaatttataaaagtgcgcatcccattcattatggtatcgcatttaaagtcacttcctctgaagcggctgagcaatttataaataaattaagcgctattttggcgcaataaaaagggccacatagtggccctttttgcatctagtagggttagcgtttaaggaagctatttactgaacttaactcacgctttttcagtgcaatacaatcattaacgctttcttcaagcttactaagagagcgtgcataccctggtacttcagtgattttatcattgaagaaggttttggttttctctaggctttgtgcatcacagcttgcggtagtgaagaacggcaagtttggtacaaagaacggtggtaagttcttagtgatcgcatcgtaattgttgtaaatccattcaataaacagtgcttcacgttctttaccatagcctaaaccacctaacagcgtgcgcatatctgaggctgttacgtcatcagttaagctgtattcaagtactgctttttgtagctctggtttaccaaagtaacccattgctgccagcatcttagtacgtacttgtggatctttggtggttttaaaggtttgcttgtacttttcaagtaacttcgcatcaccatggtaagcagcaagatttaagtaagttgatgctaagtatgggtctacattttcaggattatttaagtaaagtgctgcttgcgcttttgcggtatcaattactttttgatcttcaccatcaaaacctaaacgcgtaatcacttgcgcacgtaattgtgatactgccgcgtcttcatctgcttttgctgttaaaccatactgcttggcagcaggtgaaatgctgttacggataaacttaggccatagctcacggttgctgtcgtcttcgaatacacgtttttgagaagcaaggtaacctaatgctgtatttgcgactaatgggtgcgcatcacttacgaaggcttctaaagtttgcattaagtgagcggcagaaataacacctgcatcaagtaatgaatcaacagcagaaagcagcgctaagcgttcacgaaccgttagtttgtcagcagcgttatcgagcagggcattgaactgtgcgtcatctaatacccagcggtaatagcccattgcaccttgatctgggtagatccactcaggctcaaagtcgagagtcagttgctgtgtttctttgttaagcagtacacttgcggttttaactttgtcgcccgcaccatacttaatcgcaaccggaacattccaaagttgtgcaggtgcatcaacgccagcatttacaaaacggctttggctgatattaatttttttaccatcttgcgttactttgataagtgggaaagatgattgttcgataaacgattttagaacactggctacatctttattagacgcttcgcctagtgcttgccatagatccgcggcttctgcattcttatacgagaatttcttcaagtaagcgcgaataccttgctggaatgcatcttcgccaatccagttttcaaccatagataaaactgcactacctttgctgtaggcaaggccaaggccatccataatgtcagcttcagttttgattggtttacgaataggcttggtacttaaacgcgcatctaaggccattacataattttgtggtaaatctaagtgcgactcaaactcagggttaatttgtgctgtgattttcgctgccatccagcttgcgaacgcttcgtttaaccataagtcattccaccatttcatggtcactaggttaccgtaccattggtgggctaactcatgggcaataattgatacattacgctcttttttgctgcgcgttgctgtcgctaggtctaccagtaaaatgtcttcacggtaagtcactaagcctgcattttccatcgcgccaaatgggaactctggtactgccactgagtctagttttttgtaaacgtaaggaatgccaaaataatcttccagtgcttttaacacgcgaggcatattttcttttgcgtaatcagcaaggtgaattttaccttgtggagtcaatacgcggccagggatcggcatgcctttaatttcaagctcttcaaacgggcctacagccatggcgactaaataagaaggaataggcggcgttttatcaaaaaaatgtgttgtcatatcgccatcaactttggtttttaataccggtgtgttggcatacactttttgtgatgttggcgctgtgattgttagctggaaaggtattttataactaggctcgtcaaaaacggggaatgcacgacgagcatcactcatttcaaattgggtgaaaagataaggcgtaccttggtctaaggttttatataaaccaacactttgacggttataaggtgcggtaaaatcaacttttaaagtgtatttaccaggctgaattttttcttcacacgcgaatttaactttgcctgtttttagcatttcagcgcttaggtcgcagttttctgcacctaaaattttcgccatactaacggcataatcaataccgtttaattcgatgtaattcgttgcttttagaacttctaaagcaatttcggtatgaccagaaaaattgtcttttgcaggatcaagcgttagtgctacttgttgtgagctaggcttggcaagcttttcgataacatattcattggcatgggcagagctaacagcaagtgcaacacttaccgttaataggctttttaagaacataaatatccctgattttttgttgttagaaaggcacctgctatgaggggcgaatcaccatgctatcaggttttaatttgaacagtaataaatagttagtaacaaagtttgtcagttaattatgacggtcgatgaaacgttgccaatgcagttgcgggtttatttgtcggacgttttgtaacacggcatttaataacggcatatcagtaaagcgttgctcgttgaaatctttaaaaccaagtaagtagttaaaagcatctttgctgtttgcttgcagggcatgaattcgcacttgttgttcaaagttaagccgtaagctgctaattgcggttttcataccttgttgatcaacatttggaatcgcgcatttttgtaaataaccagctcgctcaccttcgccagaaaaccaaatacgtactttttcgctatagcgacctgatttagcgggtaaatcaaacattagtcgttgctggttttgctcgtttaaaaagtctaagtactgatcaagtcctgcatcgagtaatgcattatgaataggcacatagcggggttttatcttgccatgcgtatgaaaatcaaagcagcgaataccgtcaagggtgacgatgttatctagggttaagtggccaatttcatcgctgtaggcaccagtataataagcaaataaaggcagccaaaagtgccaatgcttagcttgttcacgaactaaacgctgatcaccatagatgtaaccattatacagggtatgtaattccatggccgaaaatggcctacgaccaagatgggacttcaacctaataccttgataataaagatgtgtcgaagagtataactgatatacccaaaccacctcaagatgcgagtttcagttggaattaaaagcgatttaggcaaggcattgattgcaagtaatagtggttctattgttaaaatcaatataagtatcaagtttccagcttaacgacactgccataaatacggccgtgtcgttataagtttaaggattgctattaatcgcaaagagctttagctaaaccaaccggttcgatttcaacgcatacttgatcatcgttccagtttaaaccaactagcgcatcatcttcgtttaggtcttcaacccattcgtccaaaaattcatctaggccaatttcgactggcgtatagtcttgccactcgtctttacattgtgcttttgctgcgtcttcagtgccccaaagtaatagcacatcagtgtcgctaaattggtttgattcacagacaacaaagccaccatcttcggcacccagtgcccacatagattcgttcaagcgaactttttcaacaaagctaactaattctgattcaatttcgatatcgctcatttgcgtaacccttatctttattttcgtggatctgtttgttgtaccgccgcgttatctgcaaatttatgataaaactctactaagtgtgttagttgactaaaatcagttaattcacgaaagcggatccaatctagcaagcagtataaactgatgttgaggtattcacagcttttaaatactggctcagataaatgatcatttaaataggctaatgtttcagcaattcgttcgttttgtaaattaaaaaacaatttatcgtcgtgggtattaaatccagagcgctggcaaagtaacatttctacgagtgaatcattgcaagcattaataatggttaaataattttcttgttgccaactgagtaatgtttgatctgtattttctagcaagtagcgaattattgagtttgagtcaaaaacatgaaagcctttatcaattaacacaggaatttttctagccggattatgagcaatcatggttttacggtcttgctcagagaaaatatctaggtttataaattcaagagcttgcttattgagtgcagcccaaatacgaatacggcgcacaaaaggtgaggtggtcgagcctaaaagttgcattttgagatccttcgcaaaaaaaagccgctggttaggcggctttcaaatattcgtatgaaatcagtcagtacggcttgttacttcaagcaggtggtaaccgaactgtgtttggaccggaccttgtacttggttaatgggagctgaaaaaaccactttatcaaactcaggtaccatcatgcctggaccaaactcacctagtgcgccaccatcttgccccgatgggcaattagagtgagcgcgcgcaagttctgcaaaatcagcgccctgttcaatttgctgttttaaatctaaacagtgagcttcactgtctacgagaatgtgtcttgcactggctactgccataacatctccctactatgtgttttagtattaaattactagtttagttcaatatttactgaacgaaaaattaaatttattttgcagctaattctgcttcaatcgcatcacgtaactctttagattctggcttggttttactgttgaagcgctgcactgtcttacggtctgcagacactaagtatttgtaaaagttccagttaggtgagctggttacttcgtttaagtgtttaaatatagggtttgcatcactaccgcgaacagcactggtagccatcatattaaaagtcaccccatagttaataaaacaaacttttgctgtgtctttttcatcgtcttcttcttgaaagaagtcatcagaaggaaatcctaatacaactaacccgcggtctttgtattccttatggatggcttctaagccttcaaactgaccggtaaaaccacaattacttgcggtattgacgatcaatagcggcttgtctttaaattcacaaaagttaattgattcttttgagcgcaattttcgtaatgtaacgttggtgaaatcgtcgcattggctagttgattttgctgttggcgtggcttctgtggtttgtgctgcaaggtttgttgtaattagacctgctgcaagtaacaaagcatatttatacatactaatttcccgctagttatttgtgatgaatatacgctaatatgcgaaaaagtgatcatttaatttcagctatttatgacgattcgtacagcaactcaaaacgatttaactgatattgtcgcgatttacaacgagacaattcctggacgtatggtaaccgcagataccgaagaggtgacggttgcggacaggcaagtatggttcgatagccactcagaaaaacgacctatttttgtatgtgaacaggcagggaaggtggttgcatggatgagctataaatctttttatggccgtcccgcttatgatggtactgttgaaatcagtatttatattacccagcgagcacaagggcaagggctaggaaaacaattgcttacattttcagaacaacatgcaaaaacgcttggaattaaggtgttgttagctttcattttcagccataacatgccgagtataaaactgttcaagcgctttgattacttggtgtggggagaattgccagaggtggctattatggatggaaaaccttatagcttaaccattttaggtaagcatattgacgcataacatacggtaaaacagataaaaagtgctaagtcatttgtgatgcttcgagtttttagactacgctaatataggtaattattcttatagtgggtgtggtttacagtgcgcagaatcttaattgttgatagcaatagtgttttagcgatgcgagtaaaagtgctgctggagctgatcggctgcagggttgagctattacacttttctatggttgatgattcagtagtagaacaagactttgatcttgtggctgcttctcatggtgtaccaacgacagttattcgaagattaatgggcgggttttcacatgaccgctttttattgcttgcaccaaaagcacagcgaagcgacctgcttgagcactttagcgtggtcaatcgattactgccaaatgcagtcgttatttatcctttttttgccaataaggaaattagctctttactagaagaggtgcttgagctcgatagtgacaatattcttcaacttcctaaagtgctacttgttgatcactgtgcagagcgtctagaaaaaatagcgcttaaccttaaaggcgcacatatcgagacgttaactgctgacaactcatcctctgcaatagaacttatcaaagagcatgatattgatctattaatcagtgattttacgtttgctgatggcacggggcttgagttattcataaagcttaaagcgttacaaccgcatagccgttgtttattgtatacctcaaaaccggatcaggtttctatggttgctgctattcgacaaggggttgaggatgtcttgatcaagcctgttgacgataatagcttattgcagtcagtgcataagctttggcaaaccgagttattaaagcgtcacaatgctgagcttgttgagcgattacaaaataccgttgatgctcttatcgaaaaagacagcttactgcgggttattttcaaacatactcccgatgccattattttatttgatcgccatggcaagataatcgaaaccaatgatgcatgtgaacagctattcgataagcctttgaaggagtttgaaaactgttcagtattcgatttttttgatgcaacatctattttacgtatcaaagaaaaaatagcgacgctaaataaaaatcgtcagtttagttgtgatttaaggctacttaaagaaaacggtaacacagttcctttggtgggatcgttcaatgagatagaccatcatggtgaaatagcgcttgcggtaatctttaaaaatgtgacgcacttaaaagaaaaagaagacctacttttagaagcgaaagatatgcttgaggaagaagtcaaagcgcgaacggcacaactagagcacgcaaaaaatgtagcagaagctgcaagcctcagtaaatctgagtttctagcgaatatgtctcacgaattaagaacaccaatgcattctattttaagctttgctcgttttggcttagaaaaagttgccaatgacgacttaagcaaagataaattaaataaatatttgtcacgaatagagcaaagcggagagcggcttttatctttacttaataaccttctcgatctgtcaaagcttgatgtcggtaagtttccttttaatccgcaaaagcacaacctcagtaacattataaaaaccagtattgatgatgtttcgggcaccgcccttgaaagaaacattattattcgtttatcggggggagaacaaggtattacccttgattgtgatgaagagcagatcaaccaaatcatgtgtaatttattaggtaatgctctgaagtttagtgagcctaatagtgagattgaaattagtttgtcgtcacaagaaaaaatggccgaaatcgctgttattgaccatggtataggtattcctgagcaagaacttgaaaaggtattcgctaagtttgaacaaagcagtaaaactaatagcggtgccggaggaacggggcttgggcttgctatttgtcgcgaatttgtcactttgcatcagggcacaattaaggcacttaataatgaacatggcggtgcgacaattatcgttcggttgcccctgcagatagatttaccaaaacacttaacgaatgacactaaaccaataacacttaattcataaaacggaagaaataacatggccttaaagcgaattttagccgtagatgatgaaccatttaacttagaaatcattgaagagatttttgaagatctcgattttgagctgaagatggtaaatagcggtccagaatgtttaaacgttgttgaagaatttgctccacaagtcattctgcttgacgtaagtatgcctcaaatgagtggttatgaggtttgtcgcaaactaaaagagaatccaagtacagaaaagattattgtcatgttcgtatcggcaagaggcactgtagaagagcgaatggaaggctattccgctggtgctgaagactatattgtgaagccatttagccatcaagagctaaaattaaaattattgaacctcaatcaagtccttattgaaaaagaggctctagagcagcaagtagaagatgccacatcaactgcgtttaatgcgatggctaatagcagtgaaatggggcaaatagttaattatattgaacatataggtttgattgagagtgaacgtgagttaggaaaagcctttttaaactgcctaaagtcattcgatttacaaagtaatgtcgagtttagattaggtacgcatgttgagcatttttctgtaacgggtgtgtgctcaccgatcgtcattgaattgttcgacatgttaaaaagaaaagggcgccttcatgagttttcgaaccgcattttagttaattacgacatgattagtctgcttatcttaaacatgccagagcaagaccccgataaacatggtcgaattcgcgaccatatttgctttctggtgagtgtcacagagcaacaattaaaagcgatcattactaaaaaagagttattaaaacagcagcaacaactaaatgaagctgtgagtaatgtacatagaaaatttactggcttaatcaagctgttagatgacaaccgaattagtaatgaggcagtatttaaacagctacaagaagatcttgaacagcgaatacccactatgggcttagatgaagaccaagagatatttatttatcaaaaggtggatgaaacgattcaaaactcggtagccagagaagagtctgtcaaaggagttaaatcagcgtttcatgaaatcgaaaatgatttatcgcaactattaacacgttaatttaggcatcccgcggcaatcctttttcaacaatacgaattagccgcgcagttttacgtaacttaatttgtcgcttgttttgctgttgctcgagcgcccattcgatatgctcggcaactaaagggctggcattaacaagcgtattgctcaaagcttggatgatgttgtcgttgtaatcggcattacctaatcctacagcgaggtttcgttgccaacgttcgtgaccaatgcggcgaatagggctgccttcggtattttttaaaaacgtcgattcatcccatgcaaagagcgtcagtaaatcttggtctttaagctgttgtctaggatgaaagtcagcttcatcggttatttgtccgtaacgattccacgggcagactaactggcagtcatcacagccatacacgcgatttcctaaaagtgggcgatactcttcagggattgcaccttgcaattcaatagtaaggtaagagatacatttacgcgcatcaacaacatagggctcaacaatggcaccggtagggcaaagggtcatacaggctacacatttaccacagccttcaaagctattttcttgatcaataggcagcggtatatcaacaaacaattcacctaagaaaaaccatgaacccgcttctttgttgattaataagctgtgctttccacgccagcctaggcctgctttttcggccagttgtcgctcaagtacaggtgcagagtcaacaaatgggcgaaagcctaactggccaacatgttgttcaatttgctggcctaacttttttaggcggttgcgaattaacttatggtaatcacgacctagtgcatagcgactaatataggctttatcggtctgtttgagatttttagcaaaacttgcatcaggtggtaggtagttcatttttactgagatgactcgctgcgtgccaggtaccagctcagcggggcgcgctcgcttcattccatgggctgccatatattccatctcaccgtgatagcctaaatctaaccagcgctgtaattgtgcctcgtgtttagtaagatcaatatcagtgatcccgacttctgcaaagccaaggtctttaccccattgctttatttgcagtgcgagttgttcataatcagtagcaggtgttgtcacggtcaataaaaaagtagccaagaagtggctactttatcatagattagctacattcagcagctaaaagagactatacaaagcgtttaagctgctcttgggtttgttggctgagtagatgagattgctcacaatcagccagggattcatctatttgctgtttagcttgctcacctaacgccacaatttgctcaacactttgatgagtttgggtttgagtttgctctaataaacgcaccgcactaacaatttgttgcagttgctgttgattttgctcaaattcagcgagcatgttactaaacccagttgatgtgttgctaattgctgtttcggcttcacttgagtggctaatgagctgctcagattctttattggtttcgcttactagactattcatttgattgatgaaatcgctaatttggcgggttgcatcattgacttttactgagagggttcttacttcatcggcaaccacggcaaaaccacggccagcttcaccagcacgggctgcttcaatggccgcattgagagcaagtaaattagtttgatctgaaaactcttcgaccattttcaaaatagcgcgaatgttttcgctgttctctttcaaccctgatacggtagctgagaagttaccgagtatttggctgatcattgctacttttttaacgagggatgacagttcatgagctgagttttgtacaaaactcaggtgctcactgttaacatgatgcacgctgtcagtatttgctgatatattttcaaggctcgaggtaatttgattgcttgagtcagtaattgtttgactgaactcaatttgctggtggctcaattgcgctgtttgctgcattgactgggtcatttttgagctactatcagcactcgcttgggcactttgatatgtagtggctaacaactgactcaaatgggtagtaaaagtgttgtattgttcacttaaatctcgaaattcatcgtaagtaaagtggggtaactttgcagacaagtcggcatcatgttgattaattttttctaatgtatcgcgcattgcctgcaccgggcgaacaattaaaaagcgcatataaaacacagtaaaaataaagctggcaaaaatgataaaagtcatcagccaaaataaacccatactggtttgttgttctgaaagactgctgtaaagccagataagcgtgatcgcttgaaacgcaaacacaaaacctaaattaccgacaatcttacgtgttagggtgtaaaagaaagtttgttcgataaaattataaatgcgcatatagctactcaatatggtgttgtgttgattcattttggcgtattttagtattgttcattttcacataattcaacagtatagcttagttttgttgagttacagtgactgtagtgtcatttgtgtatgacatggaaaattagtgaaaataccatctacgccatactctagcataagctctatatcttctaccttatcgaccgtataggcataaacttgaagaccgcgttgcttagcatccgcaacaaactcatggtttataaagtttttatctacatgaatgctataagcatgcagtttttgcgcaaattcactgtaattaattggaatagaggcggtgagtgcaccaatctttacccaaggcagtttttgtttaagccacattagttggtgatgatcaaatgatgagactaaaaggttatctctagaaattttcccggtactgacatttgtctcaataagctcaacaaacttgtctaatgaaaaggtatgctttagctctaaattgagcaaagttttatcatcgacccaatcaatagcttgctgtaaagtcggcactatttcgccattacccgcatcgtactgttgaatttgctcttttgagcaagcattcactttaccgcgacctgaggttgtgcgatcaagccaggtgtcatgaataatcatgtagtcatcaaggcagctttgtacatcaatttcgataccatctactgccaaatctacggcggcgagaatggcgctcttggtattttctgggtaggtaccgctggcacctctgtgagcgaatacttttatcattgcttatgtttccgagtcactgaccatgtttcataaaaagcggcgcttatcactaacgcaccgcccaatagggtgctaattgaaggttgctcatgcaaaattaaaaaagcgaaaaacgtgccatacaaaggttgcaaacaagatattaaaccagccgttgaagccgataagttttgcagacttgccgcaaacaatgagtggggcgctgctgtaaaaataaccccaacggtaattaatagcagccaattaattgtatcaacttgtaatggcggcacttcaataaaggcacagagcatgatactggcaatccaggtttgataaagcatggtttgaggaccgccatattggctaaagtaacgcttgtgaacaatattcctaaaagcaaaaaagaacgccgataaaatgccaatgacaatgcccatagttacatcattgcctaaactagcatcaggaatgagcaagtaaatgccagccattacaaccaaagcactaaaaatatctttcagttgtggtttgttaccatgaaaaaaaggttctaaaaacactgtgataacagggtaggtaaaaaaggcaatcatacctacagcgataccagccaattgcataccagcaaagtaggtgagccaatgaatcccaaccgttacgccaagcaataaggcgatgaggtaatcacgacgagagcggagcttgatggctttcttttgaattgtgagtaagatcactaatgcacagcctgcaatcgctgttcggtaaacggtaatatctaatgcacttaagctgactaactttgcaaataatgccgttccaccaaatagcagtactgcaatgtgcaagtatattaggctttgtttgtgtgcctgcattactgaccttattattgttgttattaactctctttgtaacggtaatcctttactttgtaaactccccaaataggctaatccattcgtttaattccaaaattacaactttaaatagcgatagtaataataacggcaacacagatagcaatgctgctttctattacagcgactgctgtgtttttatcctgcattgcttgatcaatcgaaattttactgaaaataattttatcaactaagtaacgaacaaccggtaaaattaaaaagccaaataatgcgtcaataaagaataaacttaaactttgctgccaagagtgaaagccaccaataagcgcatgacataaaataatagccaatgccaacatggtgcccgaaaaactcagcgcaacagctttattgcctttttctagttgctcattcaagttaaaagctgtgaggtgatcatagcctttagcgaaaataattagcataagttgacctaacaagtagaacactattgctgataaccaagtaccttctcccgttaaagcgcctccaatgatcaaggctgcagccatgtaattagcggcttgaaccaagccaaccgcttcattttgttggtttattagctgctcttggttgcaaaataaacgaagtaataatttgtcatttaaaatacgtgaacatgttaacaacaccattcctagtaaactgtagagcgaaacatttattaaatcggtaattaagcctttacttgggcctgttaaaacaaaaccatagataatagtgattgctcccaaatatcctccaattgaaagacccagtgcgctatttgcgttatcggttaattgactggtggtgttataaggagttgccaggttataagacaacttagcaagggctataattgcaatgaatagagctatgtaggcgctattgtaagccatgcttgaaagatagtgagttaagttaatatccataacggttgggttattttgttgttctttttcgaaaatcttaacacagagtgtttgttgcaaagaatatcaacgcttcatttttggcagaattaataaatttcttaaaagtttcatcgcttttttatgacaattgtcatgatgtattgcttacaaatgtcgttaaacactcattcttttttaagtaacactatacctgtaccgatacatgccggtttgtcattcattaatataaagggtatagctatgaatctaattactaaaaatatttactcgttattcgctgcggcaattacatttaacacaaattacgtatttgctgaacaaagtactatagatagtattgaacttgcatctcaacagcataacttgtcagaacttaccgaaatagcaaaaaatgcagcagggtatgatgctgcgcttgtgaattatcgccttgctattgcacataatatcatgggtgaaactgaaaaagcgcttgccttacttgatattgcacaagcagtgcttttagacgataaacttggcgcagataaaagtgaggtaaacgcattgcttgctcaagtgtatggttatcgtatttcgattaaacctattacaggtttttactacggcataaaatcgaacaatgcgttaaataatgcggtgcaaattgacaaaagtaatcctcgtgctcatctagttaaaggtataattgctttaaacacacctagcatgtttggtggaagtaaacagcaagcgctaagctcattgaatgcgtctcttattcactatcaaaatgataataatgatggttataaatgggggcaggcggaagcatatgtctggcgtgggttaacatatttagcactaaatgatgtgcaaaaagcagtgcaagattggcaaacatcacttgaccttgcaccaaactatacattgcctaaagttttgataaataacaataagcagtaactaatcgtgggcagccatatgctgcccaagtttagataagatttaaaaaagccaaaaaatgggattgagcataaatgaaaagtgatagttttagacaaagcttagcaattgaaaaaaagccttactgggtctggggtccacttgttttttcaagtttttattttttaccgttgattctaagttttgagcaattcgcagctttagatatttttattatagttatgatatatataacttttattttttactatgttaaagctgctaacgcaaaaggtgaagatgcgctcattccagtgtctataattgttattatcgcaacttttggtacatatttaactcttggaacacaaactttatttggctttgcttgctatttttttgggttcaactttagacaaaaaaaaggcgttttagggctagttgctgttgctttaagtatttttctcgcggtgtatttatttgatttgaataatccatattttattgcgccagcactcatcatcagcattgcactttattttatgggacgtgctgagaggcgtgaacgaatacatcagttaagtgaacaaaaaagtcaacatcaaatagagcagttggcaatgattgctgaacgtgaacgcattgcacgagaccttcatgatttagctggtcacagtctatcgtcgattgctctaaaagcagaactagccgaaaagttaattgttaatgataacgttgagcaagcacagagtgaaataaagcaagtggcggccattagccgagatttactcagtgatattcgtaaagcagtaacaaatatgaaacagtttaacctcactaaacagttagagtttttgcaagaagagctaacacaaaatggctttaatgtaatagtaaacaatgaattaacaaacttatcgacagcaacacaaaaaaccgtatcgcttattgttactgaggcttgcactaatattttaaggcatagtaaagggaatgaagttttaattgatattagtaaggaactaatatcaattaaggataacggtatagtaaccacatttaaaagtggcaatggcattaatggcattaagcagcgtactgaagcacttggcggagagcttattgtggaaaataaaaaagggtttaacctgactatgaattttcaagcgaatttatcatgattaatttactcattgttgaagatcagcaaatggttagggaagcaattagtgcgcttgttggacttgatccatttattaatgtcgttgggcaagcagaggatggcaaagctgcacttaaatttattgaacaaaataagattgatatggtgttatcagatattgaaatgcccaatatgtcaggcatcgaattggtagaaatactgagtaagcgccattctgatattaaaaccatgataataactacattttcaaaggcaggttacataaaacgtgctatgaaagcagatgttcgcgcctttattttaaaggaagcgccatcagagcatttaattaatgcaataaaatcagtcaatcaaggccgaagagtcattgatcccgaacttgctttacttgcattatctgacactgatccattgactaataaagaacgcaaagcattaaaattagccggtgatggcttaaaaactcaagatattgcaaaaacattgtttttatcagaagggacggttagaaattatctttcagaagcaatgagtaaactaaatgcggtaaaccgagtagatgctgctcgcatagcaagacaaaaagggtggttataaggtccttaattttgctattaaattattgaacaatttgagtgcgaaaactggtttaatcaatttcttaaaagtttaatagcttttgcctgtctcattgttaggatatgggttaaaataaccacataaccaactaacaagatagtgaatgtcaaaacaggatccaaatctcagtcgagaacaagaaaagtacgaaaacccagtccctagccgtgagttcatacttgctcacttagaatcacgcgcaaaaccagctaatttcacacaactttgtgacgaattacacgtgaatgatactgaacgtcaaatagcgttcaaacgtcgcttgcgtgcaatggagcgcgatggtcaattgtatttcaataaatttaaatgctatgcattgatagatgaatcaggcttggtaaaaggtaaagtcataggtcatcgtgacggattcggctttttagaagttgaaggcgagagtaaagattggtttatcgcgaaacaccaaatgaatatggtgttgcacggtgacattgtgcttgctaaaggtaaccgcaaaggttcaagtggcaaatgcgaagcacgcatcattaaagtgcttaccaatgaacgcgcgccaattgttggccgctattttgttgagcacggaattgccgttgtggtagcggaagacccgcgtattacgcaagacattatgatactgccaggtagtgaaaatggcgcacgtcataatcaaatggtacaggtgcaaattacgcaaaaccctagtcgacatatgaatgctgtgggtaaagtgacagaagtacttggtgagcatttagctcccggtatggaaattgaagtcgcgctgcgtaatcacgatatccctcatgtatggcctgaagcggttgaaaaacaagttgctcatttaggtgagtttgttgatgagcaagctaaacaaggtcgagttgatttacgtgatttaccactcgttactattgatggcgaagatgcccgcgactttgacgatgcggtttattgcgagcgtaaaccctctggtggttggcgcttatgggtggcaattgccgatgtgtcgcattacgttggtatgaacacgccactgaataaagaggcaattgagcgcggtaactcagtgtattttcctgagcaagttattccgatgctaccaaaagtgttatcgaatggcctgtgttcattaaacccagaagttgaccgtttatgtatggtcgcagaaatgacagtgtctgatgcaggcaagttatcagggtataaattttacgaagcggtaatgaactcgcacgctcgttttacctacactaaagtaaatgcaatcttacaaggtgatgaaaaactgcgtgaagagtatgcccagatggtgccacatttaactgacttacagcaaatgtacatggcacttaaagctgcacgccaagagcgcggtgcgattgagtttgaaaccctagaaacgcgctttgtgtttaatgcgcatcgcaagattgaatcaatcgttcctgtggttcgcaatgatgcacacaaacttatcgaagagtgtatgattctagcgaacgtatcagcagcccgcttattagaaaaacacgaagcaagtgcgctttatcgtgtgcatgatgagcctgatgctgaaaagttaggttttttccgaaactttttatcagagcttggtattgaagcggcgatttctgatgagccaacaccaaaagaaatcactcaagtgttagctaaattaggcgaccgcccagaagcagaacttattcaaactatgctgttacgctcgatgaagcaagctgtttatcagcctgataacattggccattttgggttagccttaccagcttatgcgcactttacatcgccaattcgtcgttatccagatttagtcgtgcaccgagctattaaagcggtacttaaagcgcaaggccagcaaacttcgggtgagtacgcttacactgatgacgaagtagatattttaggtgagcagtgttcaaccactgaacgccgtgccgatgatgcgactcgcgaagtggcagattggcttaaatgtgaatttatgcaagatcatgttggtgacgaatttgatggggtgatctcatcggtgactaactttggtttatttgtacgcttagacgatttacaaatcgatggcatgatccatgtgaccaacttaggcaacgaatacttccattatgatggcgctaagcattgcttaattggtgagcaaacgcacacagtgtatcgtttaggcgataaagtgacggttcaggtgtcatctgtaagtcttgatgagcgccgtataaacttagtattagcgggtgaagcaccacaagatcgttacgctcgtcgtcgtggtcgcagtgaacctgcaaaaccaagcgttcgcgcgcagcttaaagctggtaaaattcccggtaaaaaaggggaatcaaatcgctttgaagcaaagtcaggtgacaaagataatgaaaaacgtggtaagtcttctcatgctaaagggcgcaaaaagcccagcggcaaacaggctgatgctgtaaaagccagtaaaaagaagagtaagaaaaaagccactaaaaaggcaaaaaggccgggcaagaatgcccgcaaacaaagtagccgaggagcaaacaatacgtgagtaatgaattaatttttggttttcactcagttgaagcaattttagaaaaagagccggagcgctttttagaaatttatgctttaaaagggcgtgaagataaacgtttaaatccggttattgaccaagcacgtaaattcggtatttctgttcagtttatgcaacgtaaagcgctagacaataaagcaaacggtgagcaacaccaaggcattattgccaatgttaaagctgcacgtatgtatagtgaaaaagaccttgacgaaattatagcccgcgaagaaacccctttcttattggtgctagacggcataacggatccacataatttaggtgcgtgcctacgaagcgctgatgctgccggtgtacacgctattattgttcctaaagataaatcagctaaattaaatggtaccgcgcgcaaagtagcgtgtggtgctgctgaaacagtgccacttgtgcaagtgacaaatttagcgcgtactttacgtgaaattaaagacgctggtgtttgggtcgttggtactgctggtgaaaccgacactgagttattcgatgcaaacctcactgggccaatggctgtagtaatgggagctgaaggtgacggaatgcgtcgccttacccgtgaacattgtgatttactagtaaaaattccaatggcagggacggtatcgagcttaaatgtatctgttgccacgggtatttgcttatttgaagtactgcgtcaaagaaatgcgacgcaactttaatgttaggtcgttaatttatgcataaaaaagccagtgaatattcactggcttttttatggtctagagcaaataaaccttattcgatattttggatctgttcacgcatttgctcaattagcacttttaattctactgctgcattggtgatgtcactgttgatagacttcgatgctaatgtgtttgcttctcggttaaactcttgcatcataaaatctaagcgtcggccacatgcaccacctttgactataattttctttgtttctttaacatgcgactttaagcgatctagctcttcagctacatcttgcttttgcgctaggtaaataagttcttgctcaagacgtgattcatcaatgtctgttttcagttcttcaagtttttgatttagcttttcacgttgccatttagcgatttctggtaagtgcccctcaacaatggcaacttgctctaaaattgcatcaaggcgagtagtgatcatttcttgtaggtttgcaccttcatcaccgcgagcttgtttgaagtcttcaattactttgtcaaaacctgcaatcagcgctgtattaacgctatccatatcgagctcttcggcttccataacgccaggccaacgcaaaatatcaacaggattaatgtcaccattactctgttgttgcacccattgtgcgcttttaattagctgctcagccagtgattcgttaatcgttaactcaccaacatgagctggatttgcagcaaactttaagaaaacttcaactttaccgcgttgtaagtgtttacgtaaacgctcacgaataacaggttccatgccacgaaattgctcaggtgcgcggataaaagtctcaaggtaacgttggttaactgaacgaatttcccaagtgccagtgccccattcgcctttaatttcgcgacgcgcataagctgtcatgctgtggatcatggataatttcctagtgttatttatattcaaagttgcttgattataccgtatcagcttttaacctctagcgtaaattttctgaaatcggcttttcagatacagttaattatgtaaatcacatggcatctgccaccacatcgacttataatgtggcaaattcagaattaaggggatcgttaatgcgtccaagcgaaagaacacctaatcaaattagaccggttacatttatacgtaattacactatgcatgctgaaggctcagtattagtagagtttggaaacactaaagttttgtgtacagcaactgttgaagctggtgtaccacgctttatgaaaggccaaggtaaaggttgggttacggctgaatacggtatgttacctcgttcaacacatactcgtaatggtcgtgaagcgtcgcgcggtaagcagggcggtcgtacaatggaaattcaacgcttaattgcacgtgcacttcgtgctgcagttgatttaaaagcattaggtgaaaacaccattactatcgattgtgatgttattcaagctgatggcggtacacgtacagcatctattagtggtgcgtgcgttgcgttagttgatgcactcacttacatgcgtagtaaaggtatgatcaattcaaacccacttaagcatatgattgctgcaatttcagtcggtgtatataaaggtcaaccaatcacagatcttgagtacctagaagattctgaagctgaaacagatatgaacgtgattttgacggaaacgggcaaaatcatcgaaatccaaggtacagctgaaggcgaacctttctcattcgacgaactagatgagctacttacattagctaagcactcaattcgtgaaattatcgacgttcaaaagcaagcattagcttaataaagaagtaggtttattagttatgaaagattatcaaaaagagtttattgaattcgcacttgaaaagcaggtgcttaaatttggtgagtttactttaaagtctggccgtactagcccttacttctttaacgctggtttatttaatactggtcgtgaccttgcacgtttaggccgcttttatgcagctgcacttgaagatgctggcattgaatacgatgtattatttggccctgcttataaaggtattccaattgcaacgactactgcggttgctttagctgatcaccacgacaaagatgtgccttactgttttaaccgtaaagagaaaaaagcacacggtgaaggtggtacattagtaggttctgaactcaaaggtaagatcatgttagtcgatgacgtgatcactgcgggtacagcgattcgtgaatcgatggaaatcattgcagataatggtgcagacttaagtggcgttttaattgctcttgaccgccaagagaaaggcaaagctgagttatcggctattcaagaagtcgagcgtgactttggcactaaagttatctcgattgtaaaactagctgacttaattagttacctggaagcgaaaggtacaatggatgagcatttagcggctgtaaaagcataccgtgatcaatacggcattgcataacaactaaaaacgcgaatttttaaaagcccagctatgttgctgggcttttttgtttttagagcgttgtgcttttatagccttaaatacagctaaaaagttactaaagcgttaataaagtttctcttttgtactgtttagactaaaaaggatgcaaaaggtagtttttttaaagttttctcaaaaaagtgcttgcgttaattcgctgcatccctataatgcgcatccaccgacacggcggactgcttacaaacaagcgaaacgacgagttggttaagtcaagtaagactgagttttgaaaaaataaacttttctcaaaattaagtgttgacaaaaataacggcttgcgtagaatgcacagcccttgagacgcaaaagtatctcaaaacgttctttaaaaatataaagcaatcatctgtgtgggcactcgtacagattgagttctaacagcgaagcttagtttactaagtgacgcaaacaaatttagagtctcaatttcttatgagtgactatatagtcaatttatacagaattcattgagcacgaaacttcggtttcaaaaaacttttaattgaagagtttgatcatggctcagattgaacgctggcggcaggcctaacacatgcaagtcgagcggtaacagagagtagcttgctactctgctgacgagcggcggacgggtgagtaatgcttgggaatatgccttatggtgggggacaacagttggaaacgactgctaataccgcatgatgtctacggaccaaagtgggggaccttcgggcctcacgccataagattagcccaagtgggattagctagttggtgaggtaatggctcaccaaggcgacgatccctagctggtttgagaggatgatcagccacactgggactgagacacggcccagactcctacgggaggcagcagtggggaatattgcacaatgggcgcaagcctgatgcagccatgccgcgtgtgtgaagaaggccttcgggttgtaaagcactttcagtaaggaggaaaggttaagtgttaatagcgcttagctgtgacgttacttacagaagaagcaccggctaactccgtgccagcagccgcggtaatacggagggtgcgagcgttaatcggaattactgggcgtaaagcgtacgcaggcggtttgttaagcgagatgtgaaagccccgggctcaacctgggaactgcatttcgaactggcaaactagagtgtgatagagggtggtagaatttcaggtgtagcggtgaaatgcgtagagatctgaaggaataccgatggcgaaggcagccacctgggtcaacactgacgctcatgtacgaaagcgtggggagcaaacaggattagataccctggtagtccacgccgtaaacgatgtctactagaagctcgactcttcggagttgtttttcaaagctaacgcattaagtagaccgcctggggagtacggccgcaaggttaaaactcaaatgaattgacgggggcccgcacaagcggtggagcatgtggtttaattcgatgcaacgcgaagaaccttacctacacttgacatacagagaacttaccagagatggtttggtgccttcgggagctctgatacaggtgctgcatggctgtcgtcagctcgtgttgtgagatgttgggttaagtcccgcaacgagcgcaacccctatccttagttgccagcgattcggtcgggaactctaaggagactgccggtgataaaccggaggaaggtggggacgacgtcaagtcatcatggcccttacgtgtagggctacacacgtgctacaatggcgcatacagagtgctgcaaacctgcgagggtaagcgaatcacttaaagtgcgtcgtagtccggattggagtctgcaactcgactccatgaagtcggaatcgctagtaatcgcgtatcagaatgacgcggtgaatacgttcccgggccttgtacacaccgcccgtcacaccatgggagtgggttgctccagaagtggatagtctaaccttcgggaggacgttcaccacggagtgattcatgactggggtgaagtcgtaacaaggtagccctaggggaacctggggctggatcacctccttatacgatttagaacttatttgttcgtagtgtccacacagatgattgttaattagctaaaccacttggtttaactaattaatatgctctttaaaaatttggaaagctgatattaaaattcttatagatattcgtatctataaagagttttcaaaagtaaaaatatgccagttaatcagcaatgattaatcggtatctactttagtattctcatcattatttgatgaattaacttctggcgaagttaacagctgtcactaacaaagacccgtttgggttgtatggttaagtgactaagcgtacacggtggatgccttggcagttggaggcgatgaaggacgtattaacttgcgataagcctagtcaagctagtaaaaagcgcttgagactaggatttccgaatggggaaacccacctgcttgcaggtatcttacactgaatacataggtgtaagaggcgaacgcggagaactgaaacatctaagtacccgtaggaacagaaatcaaccgagattccggaagtagcggcgagcgaaaccggaccagcccttaagcttattatgtgttagtggaacattctggaaagtatgacgatacagggtgatagtcccgtacacgaaaatgcatcttaagtgaaatcgagtaggtcggagcacgtgaaactttgactgaatataggtggaccatcatctaaggctaaatactcccaactgaccgatagtgaaccagtaccgtgagggaaaggcgaaaagaacccctgtgaggggagtgaaatagaacctgaaaccgtgtacgtacaagcagtaggagcccacttgttgggtgactgcgtaccttttgtataatgggtcagcgacttatattttgtagcgaggttaaccgattagggtagccgtagggaaaccgagtcttaactgggcgtatagttgcaaggtatagacccgaaacccggtgatctagccatgggcaggttgaaggttgagtaacatcaactggaggaccgaacccactaacgttgaaaagttaggggatgacctgtggctaggagtgaaaggctaatcaaaccgggagatagctggttctccccgaaatctatttaggtagagcctcggacgaatacttacgggggtagagcactgttaaggctagggggtcatcccgacttaccaaccctttgcaaactccgaataccgtaaagtactatccgggagacacacggcgggtgctaacgtccgtcgtgaagagggaaacaacccagaccgccagctaaggtcccaaagtcatagttaagtgggaaacgatgtggaaaggcccagacagccaggaggttggcttagaagcagccaccctttaaagaaagcgtaatagctcactggtcgagtcggtctgcgcggaagatgtaacggggctaaactatgcaccgaagctgcggattcatactttgtatgagtggtaggggagcgttctgtaagccgttgaaggtgacccgggagggttgctggaggtatcagaagtgcgaatgctgacatgagtaacgataatgcgggtgaaaaacccgcacgccggaagaccaagggttcctatcccatgttaatcagggtagggtaagtcgacccctaaggcgaggccgaaaggcgtagtcgatgggaaacgggttaatattcccgtacttggtataattgcgatggggggacggagcaggctaaacaagcatggcgttggttgtccatgtgaaagtatgtaggttggtgacttaggaaaatccgggttgctaagactgagatacgagacgagccactaaggtggtgaagttgttgatgccatacttccaggaaaagcctctaagcttcagattataccgaatcgtaccccaaaccgacacaggtggtcaggtagagaatactaaggcgcttgagagaactcgggtgaaggaactaggcaaaatcgtaccgtaacttcgggagaaggtacgctcctatctgtgatgagacttgctctctaagcggacgggagccgcagtgaccaggtggctgggactgtttattaaaaacacagcactgtgcaaaatcgcaagatgacgtatacggtgtgacacctgcccggtgccggaaggttaattgatggggttagttttcggacgaagctcttgatcgaagccccggtaaacggcggccgtaactataacggtcctaaggtagcgaaattccttgtcgggtaagttccgacctgcacgaatggtgtaaccatggccacgctgtctccacccgagactcagtgaaattgaaatcgcagtgaagatgctgtgtacccgcggctagacggaaagaccccgtgaacctttactacagcttggcactgaacattgaccctacatgtgtaggataggtgggaggctttgaagcagaaacgctagtttttgtggagccgtccttgaaataccacccttgtagtgttgatgttctaacgttggcccctaatcggggttacggacagtgcctggtgggtagtttgactggggcggtctcctcccaaagagtaacggaggagcacgaaggttggctaagtacggtcggacatcgtacggttagtgtaatggtagaagccagcttaactgcgagacagacacgtcgagcaggtacgaaagtaggtcatagtgatccggtggttctgaatggaagggccatcgctcaacggataaaaggtactccggggataacaggctgataccgcccaagagttcatatcgacggcggtgtttggcacctcgatgtcggctcatcacatcctggggctgaagtcggtcccaagggtatggctgttcgccatttaaagtggtacgcgagctgggtttagaacgtcgtgagacagttcggtccctatctgccgtgggcgtttgagaattgagaggggttgctcctagtacgagaggaccggagtgaacgaaccgctggtgttcgggttgtcatgccaatggcactgcccggtagctacgttcggaactgataagcgctgaaagcatctaagcgcgaagcaggcctcgagatgagttctcactagacttttaaagtctctgaagggccgttgaagactacaacgttgataggcagggtgtggaagtggtgcgagccattaagctaacctgtactaattacccgtgaggcttaaccatacaacgccaaacgcgttttatgacagcgtaacagacagaagttaagacactaaagtagacatttacttgatatcagaattccgaattttagttgattgcaaaagcgattaacgccccaaatttgcttggtgacaatagcgttttggacccacctgaccccatgccgaactcagtagtgaaacgaaacagcgccgatgatagtgtggcatttgccatgtgaaagtaggacatcgccaggctccaaattaaagaaagcccgattcgaaagagtcgggcttttttgcgtttagagctgtcagctttcagccgtcagacgtcagctgagctgcggggttgtttagtacagagactccctcagcactccctgttcattctccaggtaggttgggtagagcggagcgaaacccaacgagttagctagttacaagttagcaagggtaaagttgaactgtgtggttgtttagtacagagtcaccctcagcaacaacccccgtaggaggcacttcagtgccgaattcagaccagaacaaacacatttacggctaaagccattcctacaagtacactttgcctagaacctccggcagaggaagacgcagcaccaaacacctccaccgcgctgctgatcgcagacggttgaaagctgatagcactgtgttgggtttcgctgcgctctacccaacctacgccagatctcaaactttaccctttctaactcgctaactcgccactcacgtttataacgcttactccccttgtctttgttctgctttggctagttgaatgtatttggtttcgactagttgtgagagaggaacaagttcgaagccttgtcgttgaagctcagggagtgcttgctgaagaaatgtaacggtttctgggtaggggtgggcaatggcgattgcgtagttgaagtgctcagctttgcttttaagttcctcaagttgatgttgtagttggctttgggtgacattgttatcaagaaatacatgacgagatacgtttgccacaccatataggttagcaacattttgtgcttcactttggctggttgtacggctatctaagaagtacaaaccacgtttttttaaaacttccatcgtccatttcattggctcggtaagctgtgttagctcagagcccatatggttattgaccccttttacctgtggcagtgatgctaacgcatggccgagggttgtttgtaactcagacttagtcatagtatcggtgagggctccaggaccaagcgctttagttttatcaagcgcttgcattggaacatgtaaaagcaattctttatgagttttactagcacgctctgcaaaaatttgtgagtaaggggtatgaggcaagatagaaaacgtaacttgccctggtaagttgagtatctctagatcgcgttgattattaccaatgtcgtctataacaatggcaatttgctttgcttggcagaatagaggcaagcacaaagcagcgattaataagctttttagtcgattcactttttgtaattattatatccagtgtgtgcgcttacttactgcataatagcgaactgttttgctgttagctgttttttgtcctgtctatcaagcagtgaactaaaaagcgccaattcttgtatattttttattataacgtcttggttaatttctgaaagtattgtttgatttatactcacatcaggtgtgatccctttaccatctattgactgaccaagaggggtataataacgcgcagtggtgagttttaatgctgtattaccgttgcctagcggaataagcgattgtactgagcctttaccaaaagatgtttcgccaattaaagttgcacgttggttatcgcgaagtgcagcggcgagtatttctgcggcagaagcagagttttcatttattaaaacagcaataggggctccttctaaaatatcaccgctatgtgcagtgtatctctggtttgcctcattaaagcgtcctttagttgaaacaatgatgccgctgtctaaaaataagtctgcaacctctatggcgccttgcaatgtgccgccgggattatcacgtaaatcaataattaaaccagataatgggaagctgttattaacttgcatttttgcaagttcacgcgcaacgtcatgtagtgtgtgattattaaatgtattaatgcttaataaagcgacgcctgaatcggataggtagccatgaacgctttctagtgtgatttgttggcgcttaattgaaaagcttaatgctgttgattcttttcgcatgattgaaacattgacggcgtctaatccgctctctcgaatcagcgttgcaacctcatcaatactcttattcatgataggctgatgattaatcgcaacaacttcatcatttatttgtaatcccgcctgttctgctggggagttacttaaagtattgacgatataaactcgtccattatccattttaacttcgatccccaagcctgtgtaacggccattggtgttgctaaatatggcatcgagctcattttcattaagatatttagagtagggatcaagctgttctagtaattcttccacttggtcgttattaggttgactaacaaagctattttgtaacttcaaatcatctacataataggtgtgaatattaaaaagtatttcgtttagctgttgacgatgaagtgtttcaagcgaaggtttagcaatgcttgggaatgattgaaacaccaagcaaaataatgtaactaacgttataaaacacagctgagtaaaaaacttggctgggtagatagctctgaatgtaagggttgtgtttagcatcagctgctcctcatagggtgcagctatttaatctattaaatgcgtctgcaccattttacaggatttactgcgcgtcctttgtggcgtatttcaaagtatagaccaggatctggttgtccgccgctttgaccaactaaagcaattgtttcgccttctctaacaaggtcaccaacatcgcgaagtagagtttgagcatggccgtataagctcataaagccatcaccatggtcaatggcaatcacccaaccaaagccatttaaccaatcggcataaacaacttggccgttctgtacgcttttaacattactgccttctttagcgctgataagtacgcctttccagtctatgttgccgtgcttacgttgtccaaagcgatggcgtagtgcccctttggttggccagtctagctttcctttactgctttgaagacctagtagttctactttttcactgcgctctctttctaactcttcaatggctgtgatgagagtttgttcattctcttttaaatagtctattgagcttttggtctctttgagtgctgactgaagtttattgaggttgcttttacgttcttgttgagctttaactaatgcctgctggcgctgcttttgctcatcatataaggcaactagacgttgtttcgttttttcaagctcagcttggttgtcagctatttcttgctgcagtgctttgagctcttcaatttgcttaatgcgtgctttatttaggtaattgtaataactgagtgtacgctcaattttggctgtgtcttgttggttaagcagcatttttgaatagtcatggctaccagccatgtaggcgctttttagctgggcagctaataaggtttgtcgcttggcttgttgagctttaagctgctgtgctttagcttgttgttctcgctgttgttgctcgttttctttaaccgattgggctgcaaggtttaatgctttggcattttgagctatatcgagctcatgggcgcgcagatctttgcgcatttgagcaatggacttgcgttgacctttaagctcagcctctgttttttgtaaagctgattgaatgtctgataagtcttttttggtttgatcttcattagcaacaaccgaagttgttactaatgaagtcagtattaaaccagttttaaagaagtggttaatacatttactcatagcttatttcagcgtcatgattggtttacctgtcatttcacttggctgctctaagccgagtaggtgaagcatggttggagccacgtcacttaatgttttaccatcatgtggtgtcgcatcacggccaacatagataaatggcacaggctcactagtgtgtgcggtatgtgcttgacccgttgccgggttagccatttgttctgcattaccgtggtctgctgtgatcagcgcttcaccaccatgctcttcaagtgcagctataacacgaccaatacagtggtcaacagcttcacatgctttgactgccgcttcgaatacacctgagtgacctaccatgtctccgttagggtagttacagatgatggtatcgtatttaccgctagcgattgcttcaaccaatttatcggtcagcatttctgagttcatttctggttgcagatcatatgttgcaacttgtggtgatggaattagttcgcgagtctcgccaacaaattcatcttcacggccaccactaaagaagaaggtcacgtgtgcgtatttttctgtttcagagatacgtagttgtgttttaccttgtttctctagccattcacctaatacatttgttaaaggctctggggcaaatgcaatcggtgctttaatgtctgctgcatactcagtcatcattacaaaagcgcttaacttaggtgattttttcttatcaaaaccgctaaagtcagcatcaacaaaggcacgagtcatttcacgtgctcggtctgctctgaagttagcaaagataacagtgtcgccgtcattaatctcaacagctgtttggccttctggtactactgtagttgcagcaacgaattcatcgttttcatcacgtgcataagcctcttctagtgcggttacgccatcagtgtagctgtattcagcaataccactaaccataacgtcataagcaagctcgacacggttccaacggttatcgcggtccattgcatagtaacgaccaacaagtgttgctaaacggccgcagccaagttctgcaaataatgcttcgatacgctcaattgatgcttttgcactgcgtggcggcgtgtcacgaccatctaagaaaccgtggaagtaaacttcttttgcaccgcgcttggctgcaagttcaatcgttgcaacaatgtggtcttcgtgactatgaacaccacccgggcttaaaagacccatgatatgtacagctttgcctgcatttacagctttgtcgatattatcaacaagtgctgggttgctatcgaattcaccatcatcaatggcttttgtgatgcgcgtaaaatcttggtaaacaatacggccagcacctaagtttacgtggcctacttcagagttacccatttgtcctgcaggtaaaccaacatcaagtcccgaacctgaaattaatgtatgtgggcgggttgcccaaaggttatcgagtactggggtattagcagcaagtatagcgttactttctgtatcttcacggtatccccaaccgtctaagatcattaataccaatggttttttatgctctgtcattatagctcctgaagattggcacttatatatcactagcataccgtgttttatggttttgatcagctatcaatatgtcatattaaaatatttcacgccctagcattttcaattcaagcacgtatacttgcgtggcaaattttaattaacccatggctatgcgctgtggtacctaaatttcttagtggaaaacgcatggatcaatatattgaatttatctcaaatcatccggttttgagcatcatttggttagcattagtagcaatgctgatcagcagttggtttaaaagtaaattttcagctattcgccagattaacccacaacaagtaactttgctgattaatcgtgaagatggtcaagtcgttgatattcgtcctcaaaaagaatttaattcgggtcgaattgcgggtgcagagcatttaaatccggaaaaagctaaacaatctgatttttcaagccttgaaaagttcaagagtaaacccattatacttgtatgtactacaggcatgacagcttcaggtatcgcaactgctatgcataaagcaggctataagcgtgtttatgtattatcaggtggtatgggtgcatggcaatcagcgagcctaccaacaacgacaggccgttaaatatctacgttgcagctcgatagaggaattattatgagtaatgttgttctttacacaaaggcttactgcccattttgccaacgcgctttggcattgttagacagtaaaggtgtaaactacacgaacattgatattggtgttcatccagaacgacgcgatgaaatgatcgataaagcaaatggtggttacacggtgccacaaattttcatcaatgatgaacatatcggtggttgcgacgacatgatggcaatagaggctcaaggccttttagacgcaaagcttaacgcttaattttttaattataaaaacgaattcaagataggaattacaatgaacgaagaaaatcaaaacgcagcagaacaacaagcaggcgcgcaattcacaatccaacgtatttacacaaaagatgtttcattcgagacgcctaattcgccagcaattttccaaaaagagtggactcctgaagttaaacttgacctagatactcgttctaacaagttagaagaaggtgtatttgaagttgttcttgcattaacagtgacagcatctatcggtgaagaaactgcgttcctttgtgaaattcaacaagcaggtatttttactatcgctgatgttgaagaagtacaacttgcacacatgctaggtgcattctgcccgaacgtacttttcccttacgctcgtgaagcagtatcaaacttagttaaccgtggtactttcccacaattaaacttagcaccagttaactttgatgctctttttgctcaatacatgcaacagcgtgcagctcaagagcaacaggcaactgcagacgcataagctatgactacagcacaatcagctgttacagttttaggggcggggtcttatggcaccgcccttgctatttgctttgccagaaatggtcacccagtcactttatgggggcgcaatagcgatgacgttgctacgcttgcagctgagcgaaaaaatcaacgttatgttcctgatgtcacctttcctgagtcgctaaagctagaagctgatctagaaacagcagtaaaagcaagtaaaatcattctagtggttgtaccaagtcatgcttttgcaggcactcttcagaaaataaaaccatggttaaacgaggaagctgaagttgcgtgggctacaaaaggtttagagcctaacacagggcgtttattgcaagaagttgcagtacaagagcttggggataatattccactggccgtgctttcaggacctacttttgctaaagaaatggctatgggcttgccaacagctatttcggtatcgtcgacttctaaagattttgcaaagcagctggctgatcttttacattgtggccgctcatttagggtgtataacaatgatgatttcattggtatacaacttggtggcgcagtaaaaaatgtcattgcgattggcgcaggtatgtcggacggttttggctttggggctaatgctcgtacagctttaataacccgtggtttagctgagctgtgtcgtttaggttgtgcattaggtgcccgttcagatacctttatgggcatggcaggtcttggtgacttaatcttaacctgtacagataaccaatcgcgtaaccgtcgttttggtctggcactgggtaaaggtgaaggagttgaagcggcaatcgaatcaattggtcaggttgtcgaaggctatagaaatactaaagaagtgtttttactggctgagcgtaccggcatcgaaatgccgatcacagagcaaatttacaaagtgctctatgaaaataaagatgtaaaagaagctgcgatggctttgcttggtcgagagcaaaagtcagagtaatgataccggcgcacttaaaacaaaacgcgattattaatcgcgttttttgttttttttaacttataactgttcgcaatgcgaggtactaataccttctcttttaaagatctaaaaaaccaaatcttagccttgttattaacgagattttgttgcctcaaaatagcttacttaattaagcgaataggtattacttaaattggttgtttaacttgtttttattaatgaaatcgaccacttgttcagctttaagaggcttactgtaatagaatccctgttgaaaatggcaacccataatatgtaacatgtaagcttgctcttgggtttcaacgccctcggcaataatattaataccgagatactttgctaagcggacaatagttgcagtgatgtttctatcttgatcgttatgagcgatgtctttgacaaaggatttgtcaatttttagggtgtcgataggaaaccgtttcaggtaacttaacgatgagtgccctgtaccaaagtcgtctagggcgatgttaacaccaagcgcttttatgcgtgtcatttgctgaagggcaaactcagggttatccatcattgcactttctgttatttctaactccaagcagtaggctggtacatcaaacttgcctaagtactctattaatgtgtctattaagctactgtgctgaaagtgtaaagcagaaatgttaatggctacattgccaaaccgtatattttgcttttgccagctagatagttgttttagtaaccgctctattagtaattgtgttagtgggataatggcaccattttgttctgcaagagggatgaattcgtcaggtgttataatactgccatcatcttgaggccacctaactagggcttcaaagccatgcagacgattgtgttgagcatcaaacttaggttggaagtaaagttcaaagtcattattggtaattgccttaaacagagcgctttctttcgttaactcggttgggtcaagtgtgtggcgatctttatcaaaaaactggtatgtatttcggcctattttttttgcatgatttaatgcgctattggcactgcgcatcaggttctcgcagttataagcattgtctggataaatagcgagaccacaacatacagataatgaagtttcaaaattatccagcataaaaggtgttttgaattgctgaagaactgtatccacagtttgctttgcaaagaatatcgtttttcctgaataaaggtatggaggaacaagtattgcaaactcatctgcacctagtctggcgattgtgaagcctgaattgagcgatgctgttaagcggcacgcgacctctttgagtaacacatcacctaaggtatgacctaaagagtcatttatctttttgaaattatcgatgtcaataaatacgatgagtaaactcgggtaagtgtcgttacatgctttgattgctttatcaagagattcaataaaaatagcacgattcgataatcctgtaacagtatcttttgttgtgagcttaagcatactgcgctcagtatttttacgagttgtgatatcgtaaaacagtccaacatagcgaacagtaggcttagtcagtgatgaggttattactttggtgattgataaagccagagcgtaaggttgaccgtctttacgaatgttccacatttcgccagaccagtaaccatcttgctctaactcttggagaatgattgcttcaagctgttggtctcgaccgctttgagttagcgccttaaactttttgccgataacatcgactttttgatagccagtaatttcagaaaaagcgtcatttatctcaatgatattgaagtcttcgtcggttatccaaatagcatcttttgctttagacaataacgcatccgtgaatatcatttttttatttctgtaataaaaaaacagccaagccaaaagtaataaggtaatgagggccagaagaatgatatatggaaaattagaagcttgcgtggtcaaggttgttgcagctgatgctttacctaatggaagatgcatcagcaaggtcgagcaacataaaatatgaaaagggcgcatttaaaaccatctttaggaacaagtcagcctatttaggttagttcataaaaaatggtaatgctaaataattagtgtgtttttattaaaaacgttttttcaataacttactggccattaacaaagccaagttgacgccaagactcatatacaaatacagccacagaattagataagttcatgcttcgactgtctttttgcatcgggatacgtactcgttgctctttaggtaaagattgaatgagctcatcaggtaggcctcgagtttccggaccaaacactaaacagtcacctggttggtattgtgcttgatggtgaaactgactgcctttagtcgtacatgcatagactttcttaggttggcatttttctaggtatgcttcgaacgaagcatgacgttgtacgtgactaaattcatgataatcaagtcctgcacgttttacacgcttgtcatcccattcaaagccaagaggttcaataagatgtaaggcgtagccagtgtttgcgcataaacggatgatatttccagtgttaggtgggatctctggttggtataacactatatcaagcatgtgactctctttttaaacaatatcaattgtcggtgagtatacacgaactcaaataaaaagatgatatactgacaactgttaatatctaaaggtaagttttgtgcaacatcgcagttatgagttttgggttaaaacagctagtttagtgactatcactatggtcagcttgatgattgccgcaaaaagttgggcgtggcttgcttcaggctcagcttctatgcttggctcattaaccgactcactgatggacatcactgcatctttaatgagctttttagtgttaggttatgcattacgcccagcggatgatgatcatcgctttggtcatggtaaagcggaagcattagctggccttgctcaagctgcattcattgccggttctggttgttttttagcgttccatggtattgagcgtttattcaaccctgttaccttaaagcattctgatttaggtatttgggtaagtatttttgcgattgtttgtacgttagtggtggtatttgtacaaaccaaagtgattaaccacacagaatctatcgcaattaaagctgactcaattcattacaaaggtgacttaatcttaaatctagctgtgttgctggctattgtgttggctaaatacggtgttgcgtatgcagatcctctgtttgcaattggcgtcgcggtttatttactttataacagttgggatattgcccgtgaaagtgctgatcatctgatggacaaagagcttcctgatgaagaaaaagaaacgattcttgccattgtaaatagtcatcgagatgtttatggcgcacatgatattcgtacccgccaaggcggtaagatcaaattcattcaaatgcatttggagctagaagattcactatcgctcattcgtgctcatcaagttgctgatgaagttgaggtaatgatccaaactcattttgcatgtgagatggatatattagttcacctagacccgctctcagtcgttcagaagtctcgtcaaacagagtcacaaaactgataaaaatcgctgagtactgcctgtcttatctcgtcgcgttcacataacagttcatggcgagcacccacgtaggttttcaatcgtgcatgtttctgtttatgggtaagtgcaaattgcgcagcattatcgaccacggtatcttgctctgcacttgcgataaataaaggaatatcgacttttttatcgattaaagaagcaataaaatcaaacgatgcattgagccagccgtaggtgacgccacctagttgtaaatcatcttctgctgcatacagttccctaaacagcttatagcgaatttcactactggttaattcattggctgtaaagtcgaccggcaaatagtcgctttggccaaatgcgtaactacgaccaaggccaagtaaggatgcaattttagctgccagttttgctaaaggctttggtgtacctttggtgtgaatatcaaacattggcgcggataaaaaagcacctgaaaactgatgctgataacgcgagaggtaatcataggcaatggcactccccattgaatggccgagtaaaatctgctttccttgccagtgctgctttaccactttatcaataaacacggcaaagtcatcggcatagtcagtaaaacgatttacatagcccttatgagcgttttttaaatgacgataagagcgaccttggccttggtggtcaacactaaaaaccgcaaagccattttgataaagttcccacagtaactccttatacttaaccaaagactcaattcggccactactaatgatgacagctgtatttgcttgctcaggtatggcataaccataataaagctgaccatgactcgtgctaagaaagtttttttgtaattgctcagaaaaaaactgattgatgtgctctgtgttatttataaggctagcttcagtgctataaaacatttactgactctttaaaggaaggcggatgttaacgcaaagtccaccatgttcttggttttcaagtgttagtgtaccatcatgtgcagagatcgcattctttgcaattgcaagccctaaacctgtaccaccggtgtttctatcgcgtgcatgctcttgacgaaagaaaggctcacacagccttgcaaggtttgcttcatcaacacctttaccatcgtcgcaaatagtcatgtaaatagcatcagactcttctaggttaattgaaatggtgtgctctgcgtacttaattgcattgcgaagcacgttttcaagcgcactggcaattaaggtttcatcacatcgaatatcggttttgagcgcaccattaacacgcaatactttattactttgtttggcttcaaattgggcgtcgttaagtacgtgatcgactatgatttgtagtgactgcgtacttaaagaaagggtctgactcttcgcttctaaccgtgacacctgtagtacatcggcaatcattttatcaagctggttggcctctttttcgatacgctctaaataggcctgttgggtatcatcagcctgcatttgcgcaaggccagttgccatttttaagcgcgttaaaggtgaacgcagctcatgagaaatatctgctagtaatcgcttttgagccgtaataagttgttcaagctgtattgccatagcattaaaatcacgcccgagtacaccaagttcatcttgtcgagtggacgatacatccgctcgggctgctaagttaccatttgcgagtttttttgctgtttcttttaagctattaataggtgcaattaagttgcgactgaagaaaaagctgagcattaatgatgcaattaaagcgataaatagctttaaccacgttggcattagccataagctaacgaaaaacggctttttgcgtttctcgtcaatctcatagaggtaaaacttaccttcgggtacatttaattctattggcccataagcttgatactcatcggtaaatataatttgtgggctcatgtatttagtaaagttaagcaaacttaagtcaatgtctttagagataggttcactgagcatttcaactccgtgtacgtcaccatttaagtacagcaatttatgctttgaaaagcgcggatgggataatacttcttgcgttgatttgccatgtttagcaactatccgctcaatactttttgcagtgtactgcaagttttttagcatcgggccgcgtagattatcactgcctacattgctggttagttgactcaaaaaaacgagtagggtaatggtggccagcacggtaatccaaaaccatacaaagatttttaaaaataggtagtgacgtgggtgctttaaccaactaggaggtgtcatgttattcaccttgaatgagtacgtagccactaccacgtattgtttttattcgttcattgttgacatgttcagctattttcttacgaatattactcacatgcatatctattgaccggtcaaacggagcaaggcgtctccccaatacttgttcacttatttgttctttactgatcacttctcctgcatggtctactaacattgcaagaatttcatattcagtacctgttaggctgaggatgttgtcgtttactgaggcctcacgtgttgcaaagttaatattgatactgtttacacttaacgaattgctatgttgattagacagactattaatatgttcaatacgacgggtaattgctttaacgcgagctagtagctctctgtgattaaatggtttggcaatataatcatcagcgccaagctctaacccaaagatacgatcaaagtcctctcctttggctgttagcatgatcacaggagtgagtttatgctgccttaattgttttaagacttcaaacccatccatagagggaagcatcacatcaagtagaataagttcgtagttatattgcagtgcttgttttagtccttcagcgccatcatgaaaacaatctactgtaaatccctgtgctgttaagtactcactgagtaattcgcacaaccctgtatcgtcgtcgatcattaatagtttcatttgacacctagcagtttaattctttgaggttattttactcagtaaattgtgtaaaagtgaatctttacacaacctttacactgctttgcgttcctttgcattgtaatgagtatagttaactcatcagtcgaaaacgactctggaacaccactcaacaaaaggtaatgattatgactatttcgaataaactttctaaattcgtacttgtttgtggcttagcagctgccagtgttggtactacttcagcaatggcaaaaggtgactttaatcgtggaatgaacccacaagcacgctttttactttctgagcgcggtattgataaattacaacttacagaagagcagcaaacgaaactaaaagcgatttttgctgagcagaaaacgcaatttgaagcgttacgtggtgacaaagatgcaatgaaagccgctcgtgcagctcacaaagaaaaaatggatgtattattatctacagcaaaatttgacgaaaatgcggctcttgagctaatcaaagcacgtcaggcgaaagctcagcagtttgccttgttaaagatgaaatcagagcatgatatttggcaggttttgaatactgagcaacgtgaaagctaccaagaaattaaaaagcatcttcgtaaaaaaggccataaaaagggtcatcatggaaatcgtggcgagcgtaaaggtgagcgctctgaaggttaaaagcgagttactattaataaataaaatgcggcaaatgccgcatttttgtattttataccaatgcgcttaataaagtggtctattttgaggcagcaaaacctcgttgataacaaggcaaaaatttcgttatttagttgtgctcggcaattgatcctgcattgctctaccttctgcatccatgcagtcgtaattcagaaatttttaacccaggtagcgacaggtttaatccctcaaagtgattaagtattattgcgggttggttctactttaaatttactctttaaagaatgagtcgtcatttttagcgagcatggcttcaatatcttcaatcatatcttggctaagctcattagcattgctaataggtgttgaaattcgattattttcgaatgaccactcacctaaatcaataagttgacatcgttttgaacagaatggacggaacggactttgttctgaccactccactttttctttacaggttggacaatttacaacagttggcattgctgcttctcaataattcatttaggctgatcttactgaactggagtgagagaatccagtaacgagttagaaactcgttactcggttgatttctgcaagtgaggtgacacccgctgcggcttttttgagtccagataatcgtaagttattgaatcctgatcttaatgctacttctgcaatctctaaggaattaccaccacgcataataatttgcgcaatttcaggtgtgatctgcattacttcatagacaccaacacgtcctttataaccctcagtgcaactatcacaacctttaggtgcaaatagttgtatttcactaagcttgtctttatcaaaaccttggcgaatcagttcttcatcaggtagtgtttctggtgttttacacttagggcaaagtcgtcttgctagacgctgtgcaataataagactaattgaacttgctacgttataagcaggcacccccatatttaaaagacgagttagggtttctggcgctgagtttgtgtgtagagttgataaaactaagtgacccgtttgtgctgctttaatcgcgatttcagcggtttcaagatcacggatctcaccaaccatgacaacatcaggatcttgtcgtaagaatgcttttaatgcgttagcaaaggtcatttcagcttttggattaatttgtacttggtttatcccttcaaggtttatctctactggatcttcggcggtactaatattacgctctggctggttgagaatgtttaaaccggtataaagtgatacggttttaccagaccctgtaggacctgtcaccaagatcatcccttgtggctgctcaagtgcatccatgtaaagcttcttctgctcaggctcatagccaaggacatcgataccgagcatggcacttgatgagtcgagaatacgcattacgattttctcgccccataatgtaggcaatgtacttacacgaaaatcgatacttttacgttcggttattttaagcttaatacgaccatcttgaggtttacgtttttctgcgatatctagtcgcgacataaccttgatacgtgcagataagcggctagccaagctatttggcgggcttgccatctcatgcaaaataccatcaatacgaaaacgcacacgatatcggtgttcataaggttcaaagtgtaaatccgacgcgccttttttaattgcatccattaaaattttattgatgtagacaataatcggtgcatcgtctttgtcttcatctttagctgctaaatcagttgaggtttcggtttcaagctcgccaagctctttaaattcgctttcgctaagatgtaaacttccggtcgcatcgaataattgttcaattttattttcgagttgattgtaatcaacaaccacgacttcgcatgagagacctgtactaaactcaaagttttcaaatgcaccatagtcggtcggatccgatgcggctatatagagcttactgcctttttttacaagtggcagaatgtgatgctcgcgaataagtttttctttgatcagctcttcagaaatttttgtgacatcaaagtctttaatatcaaaataaggaacacgaaatagatcggtgcattgctcggcaagttcacgaccatccataccgcaacttttagctataagctctgcggtagaactatactctttttgttttaactttactgtctcggcatcaatacgtccaagagtaatgtactttctgagaagcggcgagtttatattcattgcgcacctaagttgagcctatctttgccacaatttaccagaaaaaattagggtataacatcagtcttgtctgatttagtcaaaattgcaaaataaaatcatcataaactcatgtatttacattgactgctaattcttttgggttagtttgtggcgtgctaattaatattagcattctattttgaattagctattgttgtgcagatgctaaatatgagagatgtaactctttaactgttagaaaaacctctctaagaggacgattgttatctaaaatatcatccgcttttagtagcttatcgtctctagacatttgtgaggctatgatttgctcagctaattcagtggaaacattatcgcgttctgtggttctcgttatttgcacctcaaccggaacgtcaacgagcaaagtgcggttacaaaatttctctaagccattttcgaatagtagtggtgcaactaatattacataggagctggtggccttttgtaattgcctcagcattgattctctaataagcgggtgcaataagctatttagccattgttttttagattcatcagcaaagattattgttcttagttttgcgcgatcgagtgtgctgctactcgtgagtatttcatcaccaaaatattcagtaattttttttagacccgttgagcctggctcgacaacttctctggcaacaacatcagcgtcgactactttaattccaagttcttcaaacattgcgcttaccgcgctttttccagagccaataccgccagtaattcctaaaatccactttgccataatcagtaacctaaaaagttaaagtaataggcttgaatttgctcacgccatagcaaagtgacccaaccagcaatcgccaggtagggcccaaatgggattggcgtggttttatctttaccttgaatgattatttgtgtaatgccaatgatggcaccaacgacacttgataatagcacgatagttaaaatatcttgccagcctagtagcgcaccaaacacggctaacagtttaaagtcgccataacccatgccttctttaccagtagcaagcttgaataaccagtagacactccataagctcaggtagccaactgcggcgccgataatagcatcgctcggcgcaatggtaatatccaaagttgcagcaattaatgctaaccaaaccaatggcaatgtgagctgatcaggcagtaacatatgatctatatctataaaggttaaagcgaccaaaacccaagtaattaatatataaagtagagctaatttagttggaccaaacacagctgcaactattaaacttaaaacagctgttaaaatttcaacaataggataacgcaccgaaatcggtgttttgcaactggcacaacgacctttgagtaataaccaacttagtacaggaatattctgccaagcttttattggtgctttgcatgtagggcaagttgaattaggttttactaagttaaaggggtcttgttctgtttgctgttttgaattgagctcatcggccaatacaatacggcattccgtttgccattctcgtttcatcatcagtggcaaacgataaatcaccacatttaaaaagctaccaatacacaggctaactaagcccacagtcaaaaaataaaaccactgctgactttgcattgcagtggttatatcaagaaaaaagttttccattaaattacccaacttctggccatttataggccgattttatttcgctgtgttgaaccgtttttattatttattttatattgcaaactatcaactagcctttacagcttacactacagaccctagttggaatataggtaaatacattgcaacaatcaaaccgcctacaagtacacctaaaacaaccataatgagaggctcaagtaagcttgataagccatcaacggcatcatcgacttcttgctcataaatagttgctacctttgcaagcataccatctagcgaaccagactcttcacctatagcgaccatctgcactaccatatctgggaaaatttttgtgttgcgcattgcccagttcattaaattaccagagcttacttcggcttttatctctaaaatcgcataacggtataccgcgttgccagaagcgccagcagcagaatcgagtgcgtcaactaaaggtacacctgccgcaaaagtcgttgagagcgtacgagcgtagcgtgcaacagccgctttatttaaaatcataccaacaacaggtagttttaatattgctctgtcattggcatccctgagttttctgctcttaagaagtgcttctttataaatatagcctgcagctactacaatgattagcattacccaccaatattcctgcataaactccgaaataccaattaccataagagtaaaagcaggtagctctgcgccaaagccgttaaaaatatcttggaattgcggcactacaaatatcagcaaaatagatgttacgattatagcaaccaccaaaaccgcaataggataaaacatggcttttttaatctttgatttaagagcctctgctttttctttataaagcgcaacacggtcataaattttatcaagtgcgcctgactgctcaccagatgcaactaagtcgcaataaagatcatcaaaatagcgagggtgctttcgtaaagcttgagaaaggggaatacctgcttttacttcatcagcaataccctccattaattttgcaacgcttttgttctttgcaccagaggctatcatttcaatagactgaattaggggaacacctgccatcagcatagttgcaatttgtctagaaattagggcgatatccttagaggttattttctgtacacgtgagccaaatattggttttgctttacgcttaacttttgaaggcgtaataccttgcttacgtaactgcgctttgactaaagcaatgctttgtcctgaaagctcaccctctagttttttacctcgagcacttacaccaacccattcaaaagtatctaaagattgcttttcttgaactttactcattgtaaatccatatgttactgattgatgtttaatagcttaatagtagcggccttttgaggccgaaacaattgataaggtgatgttatcttgcttaaatatgaagattcagaggattcgggtctcaaaagtgcaaaatacattgaaggtttatagaacaaagtttgtttggagttttattcattttctagtgggtagcttgttcttgtttatagttgccacttggcttttttttagctggtttaatcatgggcgatacttactcactgatttagtgggtattacagtaattattctttcaattgatcttatattaggcccaatatttaatttctggttgctatcgccactaaagtcgaagcgtgaaaactcaattaattttggctgtatcctcatgttgcagattgtatcgcttgcttatggtattactcagatagatggtcaacgtttggcctatattgttaaatggcaaaactcctacttcacggtgttaaaaagtgaggatagaagagtaaaccatgaagaagctttatatcactttaatgagcctacagtgcaaagtaatgaaagagctttttatgaaatgatgataaaacatgccataccaccgattgaaatgtatgaatattttgtggaagttccgttatcaagcgaatgtaatgaatcaccttgcgaagtgatttctaaatcagggctagttaaattaaaaagtaccaaagagggtatgatctttttttagcaagtaccaccgctgatacaagtgctagtttgtgacaattgccatattaatcggccagattttagctgagcctgaattatgtaggtatcaccactagatttagaagcatcagcagtagccgttgaggtaattataaaactacctgaatttgtaatttcaatgtttgctacatgcttaggcgaagtgaagtcggttttttttcgacctatcttagcgaaactatcgcactttgctaaattgatattcttgttataacaaagttcaacagctctttgcactccattacttgcaagcacaacttcagtaaactttgagcgtttgaagtggttattgtaagcaggaagagctaatgaaactagtaaaccaataatggctacagttatcattagctctaacattgtaaaaccaaaatgctttggcattttgttattgattaacaaacacctttttcaatgcaatcaccagattgttcccaagtaagagtgcctccgtttgtacttactgaaggttttaagatatatgttgcactgtctacatcagcagttccttttgctgtaatcatagctgtagttccagtaagaacaacgctatcaacatattgaccatctgcaacgcctgcagaaaggcctattttagctgctgtatcgcaatttgctaatttgccagcgccacgagtttggaagcaaacgtctacaaggcctttagctgaagatgctgctaaaactacttcagagaagcgtgcttttttagtgtaagtttggtattgcggtagtgcgatagctgcaagaataccgatgattgcaattacaatcattaattcaattagggtgaaacccttttgcttttgttgtgtcatttgttcctctcctaaaggatatgatgatttagtaagtttagctataacttcagcgttgtaaaaccaaggctcaatttacaggttaaatcttacagttttaatttaaatgtcttcaaatatagcgtgattgataacaaagttttcaacaaacatcccatgttcaaagcatgtaaaattactttagcattattcaatgcatttgaaagctattttactgtaagacaagcgatttttctgaactttccggccttactttgagacaggtcaagtctctaaaatagggggtgcccattagtagggtctatacgcctgttgtaactcattgaaatgtttgtagtttaactgttagttatgagtagtttagtacaaaaggttgatctgcatcaaacaaatgtatgttttttgttactcacctaagctttttacgtatttaatgctttttttattttcttgtcaataaattaggtaagtcactaaatacgtataaaggggaagttagccgttaaatcgcatggatagatcgatagattgtaaattttttgtaagtgcaccgctcgagataaaatctatacccgcttgcgagtaagttttaagagtttcgagtgtcatattgccagacacttcaagttttgcgcgcttatctgttattgtgactgcttgctgaatttgctcaacggtgaagttgtcgagcataatgatatcagcacccgcagtgattgcttgctcaagctcattaagtgattcaacttctacttcaactggctttgtagggtggttgctttttgcttgtgctactgctttatcaataccgccacatgcagcgatgtggttttctttaataagaaatgcatcaaatagcccgatgcggtgattcgcgccaccaccacatttaactgcgtatttttgtaacgcccgtaagccaggaattgttttgcgtgtatcgagtagctgtgtggttgtaccttctagctcttttacataacgagcagttgttgttgctgtgccagaaagtgtttgtacaaagttaagagccgtgcgctctgcagttaaaatagcgcgagctgaaccagatgctgtaaacaaagtagcattcgctgcgactttatcgccatcatttaccagtacatcaactttcactgttggatcgacttggttaaatacttctaaaataatctcttttccacaaaatacacagtcttcacgagttattaccttggcattcgcttgctcgttttcaggtatcagctgtgcggtgatatcaccgtcactttggtaattcaaatcttcatcaagggcaagtttaaccaattggctaattaaagagtgagggactgacatgtagaaagctcattgtttatgaataaattggcgaaattttactatgtttaaccccttattagaagttaaagatcgaccgccagtagaggaggcttaatcgcatcctccttagcgaaaatgaatctaactagaccctaagtttttaaccatttacactatttaactttactgtcattgttagtttttaaaatgcatataaatgaacttggtcaattaaacaatgtgttacaacgtccatgtgcacattatgatgaacgccctgataatgaagtctcattattggtcattcataatatttctttgccggcagggcagtttgcaacaccttatgttgatgatttatttatgggatgtattgattgttctgcgcatgagagctttgctgatttagagggtttgcgggtttccgcccattgctttattcgtcgtacaggagagataattcagtatgttccttttaccaaacgagcttggcatgcaggcgtatcaacatttgaaggcagagaacgctgtaatgactttagtattggtattgagcttgaaggcaccgacacgcaagcgtatacccaagcacaatataatgcattacacttggtgacatcggcattaatcgaaaagtacccagatattaatcgttcgcgtatcgttggtcattgtgacattgcaccgggccgaaaaacggatccaggtagaagtttcgattggcaatactattttgatttagtgttttagttaaaggatataggtaaaagcatgatcttaatttcaataattattgctttggtgattgagcgtttaggggcgcgggctgattattggcaaatcggtttttatgccaactcctatcttaagcactcgcaaaaacacctttcagaaaaaggcttattcaattccccaataggctttttgatttggttaatgttaccagtggttgccgttggactcgtttatcaattctcagattttataatttggcagttagctgtgaatgttgctgtactgttggtttgctttggctgtgctaagcagcgtgctttatataagtcatacttaaatgcattaacacgtaacgatcaagaagctgcttctttatttgcattacagatggggcaaaagaaaacagaagatcagcctcatggtgagacatttgggcaaacgctagcatggctaaattttcgtttttattgtgcagtgattttttggtttgtggttttaggtgtaccaggcgcggtgctttatgcactagttcgaacctttgcagacaaggtaagggatgatcacagtgttgtctatgctaaacgttttaaactgattcatagcttactgttttggctcgattggttaccagcacgtgttgctagctttggttatttagtgattggtaactttaataaaggcaccagttgttggttgaagtatgtgctcgacttttcagttagtaaccgaaaagtggttacgcaaaccgcacttgctgctgagcaaatagagcaacaacattttggctgtacttacgaagccacctgcatgatgaaacttgtaaaaagaaatgtattgttctttttagtgattattgcagcacttactttatttggtggtttggcgtagtagattgtaggaatgactttattcataaatcgctctgttagtgcacttctattgagttctgatttttcagcactgaagtgcatactacctgtacttgctaccaagtcattcaaatagactaacatctactatctgatgactaaatgcttagatgtaatacctagtgcttaccaatctggtctgaccatttaatttttattgttttttccttcagaaaaagtcactttaatccatactgtttaatctttaagcgaattgcgttagggtgttattagtcttaaatcgcactgaaattgacagaaatacgggtttttgataacgtatgtctcaatttggtatgaccaatttacctttttggtcaaggcacaaagttaagtacccgatatttatagggttaatgcataacaatgcggacgttaataaatgtctttaaagattaaagcagcaaaattatctgatgttattttacagcaacttgagaatatgattctcgagggatcgttagcgccaggtgaaaagctgcctccggaacgtgagcttgcgaaacaatttgaagtgtcgcgaccttcactacgtgaggcaatccaaaagctagaagcaaaaggcttggtgacacgtcgccaaggcggcggaacctttgtaaaaaatcaacttgaagaggggctcactgatccgctttttgatttgatcagtaagcatccagagtcacaatttgatttacttgaatttcgtcatgcccttgaggggatcgcggcttattacgcggctatgcgtggtaccaccaatgactttaaaaaagtaaaacaaagctttgataatatcgcgcttgttaacgatgacattgtgcaaaaagcaaaagccattaatgcattccattttagtgtggctgaagcatctcataacgtggtgttactacatctagttagagggatgcaggctttactagagcaaaatgtattacagaatttaactgtactgttaaaaaaaccacagatcagccaacagcttgcagagcataggcgactgttgatggatgcggttattgaaggaaacccagagcaagcacgtcttgctagtaatgctcatttagcctttatcgaagaagccttacttgaggctggcaaagagcattcgcggattgaacgtagtttaagacgcaccaaacaacattaagcaagtgattagctaagtttagttaactacttaatttaagatttattaaaataattagtattttaaacataaggaaacctccatatgtctgaagtcaataaaattgacgtagacgcgctagaaacacaagagtggttacaagcccttgaatctgttgtgcgcgaagaaggtgtagaacgagctcaatatttacttgagcaagtgttagagcaagcccgtttagacggtgttgatatgcctactggcacgactactaactacgttaataccattccggtagatcaagagcctgcttacccaggtgacgtaaacattgaacgtcgtattcgttcaatcatccgttggaatgcgatcatgatcgtattacgtgcgtcgaaaaaagatctagacttaggcggccatatggcgtcttaccagtcttctgctgcattctatgaagtgtgttttaaccacttcttcaaagcaccaaacgatgtagatggcggtgacttagtgtattaccaaggccatatttctcctggtatctatgcacgtgcatttgttgaaggtcgtttaacagctgagcagcttgataacttccgtcaagaagttgatggtaaaggtcttccttcatatccacaccctaaattaatgcctgaattctggcagttccctacagtatctatgggtcttggtccgattgcatcaatctaccaagcgcgtttcctaaaatacctagatggtcgtggcttaaaagacactaaaaaccaacgtgtatacgctttcttaggcgatggtgagatggatgagccagaatcacgtggtgcaatctcatttgctgcgcgtgagaagctagataacctatgttacctaatcaactgtaacttacagcgtttagatggcccagtaatgggtaacggcaagatcattcaagagcttgaaggtctattcaaaggcgctggctggaacgtgattaaagttgtatggggtagcggttgggatatcctactagctaaagatacaacaggtaaattactgcagttaatgaacgaaaccattgacggtgattaccaaacatataaagcgaaagatggtgcatacgttcgtgagcacttctttggtcgttacccagaaacagcagcacttgttgctgatatgactgatgaagaaattttcgcacttaagcgtggtggtcatgagccatcaaaactttacgctgcattcaaaaaagcggaagaaaccaaagatcgtccaacagtaatcctagctaaaactgtaaaaggttacggcatgggtgatgcagctgaaggtaaaaacatcgcgcaccaagttaagaaaatggacatgacacacgttgagcacttacgctcacgtttaggtcttcaagatttggtttctgatgaagaaattaaagaccttccatatcttacacttgaagaagattctgaagagtacaagtatcttcacgcacgtcgtgaagcactgcaaggttacacgcctaagcgtattgctaagttctctgaaaagttaacattacctgaagttgacgcgttcaagccgctacttgaagagcaaaaacgtgacatctcaacaacaatgggctttgtacgtgcacttaacgtgttactaaaagacaaaggcattggtaaaaatatcgttcctatcatcgcagatgaagcgcgtacgtttggtatggaaggtttattccgtcaaatcggtatttacaatccgcatggccaaaactatacgccgcaagaccgtgacatcgtttcttactataaagaagcgacatcaggtcaggtactacaagaaggtatcaacgagttaggtgcaatgtcatcatgggttgctgctgcaacatcttacagcactaacgacttaccgatgatcccattctacatctactactcaatgttcggtttccaacgtgtaggtgatatggcgtggatggctggtgaccaacaagcacgtggtttcttactaggtgcgacagctggtcgtactacacttaacggcgaaggtttacagcacgaagatggtcatagccacattcttgctaacacagtacctaactgtatttcttatgatccgacattcgcatacgaagtagcagtaatcatgcaagacggtatccgtcgcatgtacggtgaagaccaagaaaacgtgttctactacctaacgctaatgaacgaaaactaccatcaaccagcaatgcctgaaggcgctgaagagggtattcgtaaaggtatctacaaacttgaaactgtggctggcgagaaagcaaaagtacagttactaggttcaggtacaatcatgatggaagtgcgtaaagcggcacaaatcctcagcgaagaatatggcattggttcagatgtattctctgtaacgtcattcaacgagctaacacgtgatggtcaagatgttgagcgtttcaacatgcttaatcctgaagcagaacaaaagactgcttacatcacaaatgcattaacagatgcagtaactgttgcagcaacagactacatgaagaactacgcagaacaagttcgttcatttgttccaagcagcaactataaagtgttgggtacagatggttacggtcgttctgatagccgtgaaaacttacgtcgtcacttcgaagttaatgcgggctatgttgtagttgcaacattatctgagcttgctaaacgtggtgaagttgagaagtcagtggttgttgaagcaatcaagaagttcgacatcgacacaaacaaagttaacccgctatacgcataagaggttccaatgagtattgaaattaaagtaccagatatcggtggcgatgaagttgaagtaaccgaaatccttgttagcgttggtgataaggttgaggttgatcagtcgttattaacggttgaaggcgataaagcatcaatggaagtacctgctgcacaagcaggtacggttaaagaaattaaagtagctgaaggtgatacggtaacgacgggttcacttatcatgatcttcgaaggtgaagaacaagctgcggctcctgcagaggctaaagaagaagcgccagctccagcagctgcgtcttcagcttctgctacacaggaagtgactgtaccagatataggcgatgatgaagttgaagtaactgaaatcatggttgcggtaggtgacacggttgaagaagagcaatctttattaagcgttgaaggcgataaagcatcaatggaagtacctgcgccatttgctggtactgttaaagagatcaaaatcgcaactggcgataaagtgaaaactggctctttaatcttcgtttttgaaacagcatcaagcggctctgaagcacctgcagcagaatcagctccagcagaagctgctcctgctacatctggcactaaagaagtaaacgtgcctgatatcggtggtgatgaagttgaagtaaccgaagtgatggttgctgttggcgataaggttgaagaagatcaatcaatcttaaacgttgaaggcgataaagcatcaatggaagtgccagcaccatttgccggtacagttaaagaaatcaaagtagcagctggagataaagtatcaactggctcacttatctttgtatttgaagtagccggtagtgcacccgctgcagctgaacctgctcctgcaaaagctgaagccgctcctgctgcaaaagcaccagcagctgaaaagcctgcatcagcacctgcaagcaacgaaggttttgcagataacaaagcgtatgcacatgcatcaccagttgttcgtcgtttagcgcgtgagttcggtattaacctagcaaacgtaaaaggcacgggtcgtaagaatcgtgttgttaaagaagacgtacaaaactacgtaaaagaccttgtgaagaaagttgaatctggtcagctatctgcaggtaaaggtaatgcgggtggcggtgagttaggtcttatcccttggcctaaggttgattttgctaagtttggtgaaatcgaagagaagaaactttctcgtattcagaagctatcaggtgctaacttacaccgtaactgggtgcaaatcccgcatgttacacagtttgacgaagcggatatcacaagccttgaagcattccgtaaagagcaaaacgcgcttgctgagaagaaaaagctgggtgttaaaatcacaccacttgtgtttgtgatgaaagcggcggcgaaagcacttgctgaattcccaacgtttaactcttcactgtctgaagacggcgaaagcttaatcttgaagaagtacatcaacattggtgttgcggttgatacaccaaacggcttggttgttccagtattcaaagatgttgataaaaaaggcatcattgaactttctcgtgaattaatggaaatttcagctaaagcacgtgacggcaagctaacttcatctgatatgcaaggcggttgtttcacaatctcaagccttggtggtatcggtggtacagcgttcacgccaattgtgaatgcgccagaagttgctatcttgggtgtatctaagtcagaaatgaaacctaagtggaacggcaaagagtttgaacctaaattaatggttccattatcaatgtcatacgaccatagggttattgacggtgcactagcagcacgctttactgtgacgctagcaagctacatgagcgatattcgtcaattggtgatgtaatcgtctcataatttataagaatcaaatcccagcaaggtgttttttgctgggatttttaccattggcaatgatacaatctttgccatagaacaatcttggtatagatatctgctctccctttctgccttgcagaaacatggcagttaaacttaggggcagtgtcccgttcaaacatttaaggtaatagcatgagcaacgaattaaaaactcaagttgttgtactaggcggtggtcctggtggttattctgcggctttccgtgctgctgacttgggcttagaagtaacattggtagaatctcgcaacacattaggcggtgtatgtctaaatgtgggttgtattccttcaaaagcacttttacacgtagctaaagtgattgatgacgctgcagaaatgtcatctcacggcgttacttttggtaagcctgaaatcgacctagacaaaatccgtgattggaaagagtctgtaatcggtcaattaactggcggcctagacggcatggctaaaatgcgtaaagtgaaagtagttaatggctacggtaaattcactggtagcaacacactagctgttgaaggtgaagacggtacaacaacgatcacatttgataatgctattatcgctgcaggttctcaacctgttaatttacctttcatccctgaagatgaccgcgtaattgactcaacaggtgcactagagcttaaagatgttcctgagaagcttcttgttttaggtggtggtatcatcggtcttgagatgggtactgtataccgtgcgctaggttctgaaatcgacgttgttgaatttgctgatcaattagtaccagcagctgataaagacgttatcaagatctaccaaaaatacgttaagaacaagttcaacgtaatgctttctactaaagttgttggcgttgaagcgaaagaagacggtctatacgtttcattcgaaggtaaaaacgcaccagctgacgcagtacgttacgacaaagtacttgtagctgtaggtcgtacacctaacggtaaattacttgatgctgataaagcaggcgttaacgttgatgagcgtggtttcatcaatgttgataagcagcttaaaacaaacgttgatcacatcttcgctatcggtgatatcgttggtcagccaatgcttgcgcacaaagcagttcacgaagctcacgttgcagcagaagttatctcaggtcagaaacacttcttcgatcctaagtgcattccttcaatcgcatacacagatccagaaatcgcatgggttggtgtaactgagaaagaagctaaagagcaaggcttaaacatcgaaactgcggtattcccttgggctgcttctggccgtgcaatcgcttcagcacgtactgaaggtcaaactaagctaatcttcgataaagactcaggtcgcgttatcggtggtgctatggttggtatcaacgcaggtgaaatgttaggtgaaatcggcctagcagttgaaatgggcgcagacggtgaagacctagcgttaactattcacgctcacccaacgctaaacgaatcaatcggtctagctgctgaaatcttcgaaggttcaatcactgaccttccaaacaaaaaagcagttataaagaagtaagttcttttaatgaatagctttaaaaaacccagcttaggctgggttttttgtatttagattggagcaacaaaaaaaccgtgtttgttattacaagcacggtttttgttattaagagctcgggttacttatggtagcttaagcaggtttcaacttcatttttagagcctaagatcaccgccactcgctggtggatggcatcaggtttaatctccatgatgcgctcagtacctgtagaggcaataccgccagcttgctcaattagcattgccattgggtttgcttcgtataataaacgtaatttgtttggtttgtttggatctttcgtgtctgttgggtacgtgaagataccaccacggcataatacacggtgtacatcacccaccattgcagcaatccagcgcatattgaagttacggccgcgcgggcctgtgtcaccggctagcaaatcgttaatataattttgcatcgcaggttgccaatggcgttgatttgaagcattgatagcaaattcgctggtctcttctgggatttttgcaaactcttgcgttaataagaaggtgccgtgagttttatctaaagtgaaaaagcgcgtgcctttacctgtagtaagagccaatacggttgatgggccatataacacgtaacctgccgcaacttggttcttacctggttgcataaagatacttgggtcagctggatcagagtcttcaggcgccgccataattgagaaaatcgtaccaacgagcgagttgatatcagtatttgatgaaccgtcaagtgggtcgaatgcaacaatgtagttggcatttggattacctgcaacagtgaagtcttcttcttcagaggcaatggcttttacgtagcccgattctaataaaatatcttttaaaagttggttagtgagaacgtcgagttttttctgtgtttcaccctgaatgttttcgtctagggttgagcctaatacgccagatagggcgccttgaccaacacgaaatgaaatctctttacatgccgcaagtaccgttctgatcaatgagatcagttcacgagggcaaccatcttctaacaataccggtgggagtctacgcattctattttcctgataacgttgtagccagacatttttagtgtgagagagaatgtcttagcaagcgctgaatttcgtcttaaatagctgatttttataaacggtactttatactgcttaatacctatacagtatttaaaacgcgaataacaaagataagactatgcaaaaaataccattactacgatatctgctcttagctgtgctacttactatgataactcaagcacacgcagcaattaagtctataaatgattttactgaaaaaatgactcatttttcaggctatttttcattttattacgatacagaaaacggcaaattgtaccttgaggtggataaactcgagcagcaatttttattacaacaaagcctaccttacggtgttggctcaaacgatattggcttagatcgtggtcagttaggtgatactcacttagtacagtttgagcgttttggtgataaggtgatgctaagagccattaatacttattaccgcgctaacactaataatcttgcggaacaacaaagtattaaagaggcattcgcatcaagtattttagcaggttttagtgttgttgctcagtcagacactgctgtattagttgattatacaccttacctattaagcgatgttcatggtgtgagccgccgtttatcggcaaccgggcaaggaagttttaacttagatagcaaccgcagtgcagtttatttagcgcgttcaaaagcatttgaaaaaaatacagagttagaagctgtgcttacttttcaaggaaataacccgggtaagtatgttcgtcaagtgagtgccgacccctatgcgctgacagtgcatatgcatcactcattaattgagttacctgatgataattacaccccgcgcaaattccatcctcaagcaggtttttggagcattgagcataaagattatgcggctgcgctgggtgagtctatgtatgtacgttacatcccacgtcatcgtttagcgaaaaaagatccgagcttaccaatcagcgaacccgttgaaccgattgtttattatttagatccgggcgtacctgagccagttaaaacagcgttacttgatggtgctaaatggtggaatgatgcatttagtgcagcaggctacaagaatgcttttatcgttaaagtattacctgatgatgcagaccctatggatgtgcgctataacgtgatccaatgggtgcaccgtgcaacacgtggctggtcgtatggcagctctgtgattgacccgcgaacaggcgaaattatcaaaggtcatgtgacactcgggtcactacgcgttcgtcaagacatcctaattgcagaagcattagctgctccatactttgaaggcaatgaagtggctaagcgtttgcaagctatggcacttgatcgtattcgtcaattaagcgcccatgaagtagggcatactttaggtatttcgcataactttgcagcgtcagtggcagacagagcctctgtaatggattatccacatccgttactgagctttaatgagcaaggtaagttagatgtaagccgaggctatgctgctggtatgggcgtttgggatactcaagtgattaaatacggctatagtgatttcactaatcaagatgaagcacagcaattggctgcaattttagctgaaaacaaaagtaaagggctggagtttatctcagacagtgatgcccgtgctcaaggtggtgctcacccaactggtcatttatgggataacggtagttcaccgagtgatgagctaatgcgtgtacttgatgttcgtaaacaagcgctgacgagctttggcattgagaacatcaaaacgggcaccgctttatcgcaactagaagaaatgctggtgccactttatttattccaccgttatcaagtagaagctgcggttaaactaattgctggtgtgaattacgaatacgaagtacgcgatggctcacagcctaaaggggcgcaggttgttgcaaagcaaacacaacaagcggcagccgatgcagtgcttgctacactaaaagccgagaaccttgttttacctgagtcggtattagcgcttattccaccaaaagcgtatggtgaatctaagtcacgagagagcattgttggtcgcacaggacttacgcttgatgctatggcactgcctgaggtggctgctgcacatagtttgaatctactttttaatagccaacgcattaaccgcttagcgcagcagcaagcaagaagcgatgcattttatggtttagatgcgctattagcgcaaacttatcagcaagtttttgagcaaaaaattgcttcagggatggctggtaaaattagccagcgtgtgcagcttttaacagcgaaacagtttgccgatttagtcgcaagcagcgaagtcgcacccgaggtacaagcccaacttcgttactacttagctaaactagcaaagagttatcagcaagaatcaatgctaggcagcgcatcagttggtaacagtgcattcaagcaatatttaagcgagcaaatcagtcactttttagaaagtggtgaatggcctgccaactttaaagtgttgccaatgccaccgggttcaccaatttaaccctcctgtgttttaaggcgcctagcatagctaggcgttttacttgcataaaactggatatttgctaatctagcggccttccttttttgtcttattgaggtgtatatggcgttcttttctcgctcgttgttggcagcggccattacattctctagtttttccagctacgctacccttgaaaaaaaacaatgtgatgttgagcttagtcatggcttaattattactgacgatgttattcgtattgttgataaaggtcagacacgggtacaaattaataacgataagcaattatttattcgtggttactgggttgatttgagccccgaagaaagcaaagttgttgaacagtttagccgtggtatcagacaaaccgtcccagagctagtagaccttgcgactgatggtgtaaatctcggtttaagtgcgattgaacaggtcgttgaaggtatgtcagataaagagcctgaagtactaaaaactcagctgcaatatgttgaacgtgcgctgatggataagtttaagcgtggcgatgactttttctttattgctccgcagtcgctgtcgaaaatcgatgatttcttcacgaaggaaattagccaaaaaattcactccgcagttcacggttcactgggggctattttagtgtcgctgggggatgcgtttaaatcgcgcgaagggaatatcgaagatcgtattaacgatatgggacagcgaatggatatcatctcaaaagaaattgataaatcactgcaaaaaaaagcagagcagcttgagatgaaagcttctgagtactgtgaatgtttaaactctttagatgtaactgaatcaagattacaaaaaatagtgcctggaatggcagattttgacttagtgcaaattaagtcatagccttttttaaagataaaaaaaccgtgttttgaacacggtttttttgtttgtgtttatgcttattaaactttaaacgcatcgaccgataatcgaagctcttctgctaacttagcaacttctgagcttgagatgttagtttggtttgcgccttctgctgtttgctctgcaattgccacgatagactccaatcgttcactgatctcttgcgatacttgttgttgctcatgagccgcagtggaaatttcttcacttacattgtgcgcttgagcaacagctgcagtaattgagtctagtgcagtgttggcaagatctgattgctcaacgcatgattcagcttgttgtttacctttagacattgctgctacagcagcttctgcgcctacttgcagagattcaatcattgcttgaatttcttgggtcgactcttgtgttttacttgctagtgaacgtacttcgtctgctacaaccgcaaaaccacgaccttgttcacctgcacgtgccgcttctatagccgcattgagtgcaaggaggttagtttgttcagcaatgccacgaattacatctaaaataccgccaattgacgcgctgtctttgtgtaactgattaataacgtgtgatgcatcatcaacttcacgcgcaagttgttctatggttgctttgttttgcgaagaaatacctttaacacgatcagcttctttgtccgcatttttgatttcgctaagtgcttgttgtgcactgctgcttactgcttgtgatgtgctgctcatttcagtggttgcagtggctgcttgttcaacttgtgcttgctgattgcgaattgcttggctagattcctcagtgatcgctgaagtctcttctgatgcggctgcaagttgcgtagaacgagaaataataccttgaataagtgttcgtaaactttcaatcagggtattacaactacgagacaattcaccgaattcatcttttgctgaatcatctaaacgttgcgtcatgtcgccgctggcaacgatatcaagaatacgattcacctcaagcagaggtttcgtgatacggttaaccgtaatgactgcgacaacaatagcaattaaggtcgcaatagccatcgcaatccatgtccaaatggtcgctgtcgatacattaccactcacatcttgttgtagatcaaatgctaagacagttgcttcgtttacaaggtctcttaactgctttaatgcttcggtggttgagttttctgcgttagcaagttctgcttgtgtttgcgctatggcatcgattaagcgctttttgttggctgataaactgttgttaccacgcacattgttagccaaagattcaaagtaattatttaaatcattgtatagtccagcgttgttatcaataattgctgggcgaataagaccaaggcttcgctcaatctcttctaggtaatatacttgctcatttttaatgatatcgagggtatttagcgttttcaccgtaagcatatcagtgctgtttgtaaccactgactggaagttgttttccatgttgttggcggcttggtaggcgcgagaatggttttcttcaagaccgtcaatatcaatgatatcaagaactactgagttcgcatcttctgcgctaatttctatattctcaagctggcttgcgagtgttttgtttaaatcaagttgtgttttcttatcagcaaataaattttcgacagatttattgaatcgcttgtaggtcagctcaacttgttggctgctgctttttagttcaggatcatcgctgacaatgcgttgtaactcttgataagagctatcataacgttttttctgttcattaaagcgattacgtattgttgttagttcttcttgtgatgatgtataaaaactggcttgtgcagctttactcattaaaataaattcgacctgcagctcgtagcttttatcaagcgctggtagcgacagctgattaacacgctgcgttgattgatcaatattggtaattctgaccaacgagttaccaccaataaaaagcaggagcaaggtaatgacaataaagccaccccaaatacgctgtctaacggtcaagttcatatgtaattccacaaaatagtactaatcaacacttatcggcaaggttgccaattagttaagtatttaaatttaagtagctttaatttaaatttactttaattgtataaatctaacagatgttcagttatttttcagtttatttagataaaagaatgagaactttctgtgtggtacttatttttacttagttccattagtgtcatagcacctccccatacacagcctgtgtcgagggcatgaatatttttatattcaacctttccttctagagcagcccagtggccaaatgtaatctgttgttttaatttcagaatatttggatgctcaaaccaaggaataaatgaagtatcgatacttgtattggttttattatttaaatctaacttgccatcgtgatcgacaaaccgcatccgagtaaaataattaacgatgtagcgaaacttttcctcattgcttaaagattttaaccactcaagcgggtgaggatcatacatatgcgtaaaataatgatgcgcatcgtcaccttggtaacaggattcggcgaagcgagcacgtttgagggcttttttgactgaccagttagggtttagccccgcatgactgataaacatattatagttttcaagccaaatagctaaaggttgttgctgtaaaaattgaatataatcagcgcgttttgagctattaaaaagcggttctaatttatctttaggattggctggcttattcatatggtgacaggcaatcagatgcagatcatgattgcctaatgtaatgctaacactaccttgcatgctatatagccgctcaagacacgcaagtgaatcaggacctcttgcgactatatcacccactaaatataaatgatcttggctagggttgaagttaacacgttttagtaacgcatcaaactcagtaaaacagccttgtagatcacctattgcgtagtcagccatgcttacctaatgcagtatatttggacgtgctaaacgaaacacttcgataggcgcttcaaattcagttccaaactcattgcgcattgtgtagtggccctgcatcgtgcccacaggagtatcgagaactgctccgctggtgtatttatagctttctccaggggcaattgttggcgtttcaccaacaacaccttcaccttgtacttcgacttctttgccgttggcatcggtaattaaccaatagcgacttaaaagttttgcactgcataagctgtggtttttaatggtgattgagtaagcaaaaacgtatttatcttgttcaggctctgattggccttcaacatagaaggtctcaacagagaccttaattggcgaacctaaattactgcttgttgtcataaatccaattagctatatcaataaattgttgtaaagacaggctttctgcgcgaagcgtaatatcaatacctatgccagttaactcttcagctgtcagtaagttagataaactattgcgcagtgttttacggcgttggttaaacgcttctaaacagactgtatttaaaagtttggtactctttgctgtacgttgctcaggctttttagggatcaagcggatcactgccgagtcaacttttggtgcgggcttaaagcactcaggtggcacatcaatcactggcatcgcatgacagtaatattgtgtcatcacacttaaacggccaaaagctttgctgcccggacctgcgaccatacgtttgaccacttctttttgcagcataaagtgcatatgctcaacgttgtctgcaaattcaaataagtgaaataacaacggagttgaaacgttgtaaggtaagttaccaaatatttttagtttttcatctgctttgattaaggtactaaaatcaaacttcattgcatcaccttgatgcactgtaagttttggacctaaaaatggatggcttgttaaacgctctgctaagtctttgtctaactcaacaacagttaaatggccacttaaatcagcaacaggctcagtgattgcaccaagacccgggccgatttctactaaattgtcttcaggtttaggatcgatagccgtgacgattttatcgataatcatgtcatcgtttaaaaagttttgaccaaaacgcttacgggcgcggtgtcctaaatgtactttatctgtcattgattctgtgctttttcatgggcgagcttaattgcttcgcggatcgctaattcaaaactacccacatcagcagtgcctgtaccggctaaatcaagtgctgtgccatgatctactgatgtgcgaataaatggcaagccaagagtgatattgactgatttgccgaaacccttgtattttagcacaggtaagccctgatcgtgatacattgccagcactgcatctgcttgcgataaatacttatcttggaaaagagtatcagctggtaaagggccaattaaattcataccttgattatttaaaagctcaagggtaggtgtaattgtgtcaatctcttcagtacctaagtgaccgtcttcacctgcatgtgggtttaatccgcacactaaaatacgcggcttctcgataccaaactttgtctgtaagtcatggtttaatatcgagataactttacttaatcgttcaactgtaatggcacgtgatacatacgccagtggaatatgcgttgtaacaagtgcaacgcgtaagccttcggttgcaagaagcatgacgacatcggcagtatttgattgctgagcaaaatattcggtgtgaccactgaatgaaatacctgctttattgataatgcctttatgaactggacccgtcacaacagcagcaaaggttccatccatattcttttcactggcgatacgtaaggtatcaagtacatattggccattagcgtcatttaaaacgccaacttcaacgtcttcacctaaatcaacttgatgaaggtaaacacttccagctggtgtgtcggttggagcttgcgtttcgtcaaacttaattagatttaattctaaccctaataattttgcgcgctgttttaacagcgcaccatcagcaatcacaacaagctgggcatcccagtgatgttgagctaattttattagtaaatcagggcctataccggccggctcaccgggtgttattgcaattcgtatagtcatgttcgttattctgctgggaaaatatcaacatgggcttgttcgcgcatttcttgctgccagttgaaactttcttctttaaatttacgattaaacagcagttgatgcgcgcggttacgtttagcttgctctgttttgtctgctacacgcttatcaagtaactgcacaatgtgccaaccgaattgcgttctgaaaggctcactgatttcatttttatcaagtgaaagcagagtatttttaaactcaggtacataagtacttggatcagtccaatcgtactcaccgccttttaatgcagaacccgggtcttcagagtattcttttgctagttcagcaaagtctgcctttccttcacgtaagtctttagcaaagccttttagcatgtcacgcgctttttcttcgcttaagataattgatggcttgattaaaatgtgacgtgagcgaacttctgttgtttcaaccacttgacgaccacgaacatcctgaactttgatgatgtggaaaccagcacctgaacgaagcgggccaacaatatcgtctttcttatgacccttcactgcttcagcaaacaacgatggcatttcattgatgctcatccaacctagttgaccaccttcaagggcttttgagccacttgatgatgagatagcaatacgtttgaattctttaccttcatttaaaaattcgattactttgtctgcacgtgtttttgcacttgcgatttcatcagctgttgcatcgcttgggatatcaatcaggatgtgaccaatgtcatactcttcggcatttttaccttgagtttccatgatttttaataagttatcgatttcttgtgggctaatgtaaattcgacgatcaacattggcgcgagtcacttgctgagtcgttatttctttacggatctcttcacgatacgcggtgtaactttcacctgcagcctcaatcgtacgacgtaaatctgcaatcgtaccgccttgctcacgggccatgttttcaagtgtttggtctaattgagaatctgagatttctagacccatacgctctgcaagttgcatcataagcgtttggtttactaaacgttcaatcgcttgaatacgtagcgtgtcatcagaaggcagttgctggccttgctctgctgcttgagttttaacacggttaatgatggtgtcaacttcactttgtaaaataacaccttggttaacaaccccgacgactttgtcgatttcgacaggttttgcgaaaacactttggcataggccaactgttaataatgctgatgcaaatagtttttttaaattcatactttttctaatactcttgctaatagtactgcggtactagttattaagaaaatacggtctacgatagccaaaaataccttgttgtaataatttttgtgcatcataacggcttttacttccaagcccttttaatacgatattgaaaccaatactggtatcaaaagtagcttgttcttgaccaatcgcttgattcaaatcagtttcgatttgacgacggcctgtgatttgaaacgcccagcagcaagattcatactgaagaccactgaaaacctcaatgctacgaccactttctaaatcgcggtggtagctaccaacaaactgccaatcttgtgttagcggaatgctggtgaatagaccaacttgctcgattgtattgcctgagacatcatttgcatagcgatggttcaattgtacgagctgtttatcgtcacctttataatctaaggttatgtttgattgaataatttctttaccgtcagtgtcatattgaataccacccgataaataccagcgacggtgccaatgtaacatggtttgcgctgcaaacaaggcattgtagttagtatctgactgaagcccttgtgatgttggtttagcatcattacttaaataaaatatttggccggcactaaaattaaacacctcttcgttttcattactgaataagcgagttgtggcacccaatgtgaattggtttgcagtggcaatacggtcgatacttgagaaacgacggtctctaaataaaccaaaaaaatcatcttgtaatttagctgtatcgtaaaggccaatgttcgactggtctttatttggcgtatacaagtactgaatttgtggctcaagcgtttgaatgccatctttaaagaaaaaggcagtttctcgctcgaagtttaactggctgtacaagcgtactttaggcatagtacgtgtcactctctcgtcgaagtcggtgcctgttaaatcaccatgctggttatactcagtgtggagtaagctgaattcagataaaaacgaccaagcatattcttgatagccaaaacttgcttttggttcaatgtgtagtctactcgcttcattaatgatggctttatcattggtaaaataactgagctcaccgtcaagcgttaaatcgataccgtagaaatcataggcatccatttgtgaaaaagtaatttgtggtaacgctgcataggattctttgtgatcaccaagtacttcaaaactctgtagtttaatgtttgtatgccaagtatctcccaagtaagtcagtgaaccagtacggtataactgagtgtctgtgcgagttgcataattagagtttaagtctgttaggtagttatcatcactaacgttagtaatatcgatattgccgcgccagctctcaccaaagtaactttgctgttgccagtgaaataaataacgtgagtcaacattgggttcttcgtcatctttatcaagatactcgaccgcaacgaggccattgttttgctcagttaaataacgaaactcaccaatcatttgtaagcctcgtttagacatataacgcggcgtgatggtggcatcgtaatttggtgcaatgttccaatagtatggcgtgattgtttcaataccgtaacgaccagaacttgagaagttaggcgttaataaacctgatttacggcggtcgtctaacggaaacgtaaaatagggaatataaagaaccggtgtgtcaaatacacgtaatacagtattgtgggtttcgccccagccatcttcacttgataagtcaatttcgtcagcttcgattgcccatacgggtgtttcgccagggcaagtagtaaagcttgcgttcatcaggtttaagccagactcgttgactgttagtttttctgcgccaccatgacctagttggtcggtgagcttataatcagcaccaagcaagcttaattcagaattatttaaatccgcattaagcccagaactgttaatttggcttactttatcgcgatacacgatagggccggttgcattaagtaacccacgttgtttgtcaatcagtgcactttgtgcggacaaattcatcgttagggtgttaatatctacattaccggtaaattctgcgctttgggtacccaatagttcaatatcatcggatttgatatcgatcatattaagttcaaggccagggagcggttgccaagctctggtttgcattgaagtgccacaaaaattgtgtgccagttcagtttcggcgaacgatggtgcgctaagtacgcttagcatcattatgccccaggttttgctcatttaatgaccttaatgctctttggttggatataagctagacataataaaggaaaacaatggcaaatacagtaattgacttagtgaaaaatagatatcttactaaatgaatcgttataaaagtttacagcagtttttaaatcctcactttaaagaggatgaatatcaattagccgccatcactggagatgcgagctttcgccgttatttccgcgtaaatacaagtgatcagagctatattgtcatggactcagaccccaacaaattagacaacacgccttacatagagctcaacaaggtattttctaagcacggttttaaattacctaaaattcttcaggctgatgaaaaacaaggtttctttttactcagtgatttaggcaatacacacttggctgatttactcggcgatgaagaccgcactttacactacaaacacctaataaagttaagtgcgcagtgggcacaaataccgccagctcaatacatgaaagtatttgatggtgagtttttacagtttgaactgagtatttttaaagagtggttagttgataactttattggtgagcaactttctgttgctgagcagcaaatgtggcaacaagcttgtgagttattagttaacaatgcgcttgaacaaccgattgtgacggtacaccgagacttccatagtcgcaatataatgcgcacagggcagcaatgggcgatcattgattatcaagatgccgtacaagggcctgtgtgttatgaccttgtttcgttattaagagattgctacttcaagttacctgagcaagagctcgactatcttttgcattacgcatatgacgagtttaaccagcaacagttattgcaagacacctcatttgccatgtttaaacgttggtttgatttgaccggtgtacagcgtcatttaaaagcagcaggcatattttgccgcttaaaacttcgtgacgataagtctggttatttgaataatgtactgccaacccttaaatacattagtaatgtaagcaaagaatacccagagttaacagcacttggtcagtggatagaacacactgttattccacgtaccaagctgcgcttaacaaaagagatgaaatgaaagcaatgatcctagcggctgggcgcggtaagcgcatgatgccgctaacagaaacaatgccaaagccgatgcttaggattaatggcaagccattattagagcatcatattaataatttacgtcaagcaggtattaccgacattgtcattaaccttgcatggcagggcgacaaaataacagagtattttgctgatggctcgcagtttggtgtatcgatcacttacagtcaagaacaggcgggggggcttgaaaccgcaggtggtatcattcaagcattgccgttattgggtgagcaatttattgtcataaatggtgatgtgtatactgattacgatgtgacttcgttgatgcagattcatttgcaagcgggagaggcgcacatcgtacttgttgaaaatcctgctcataatcctgatggtgattttgcccttagtcatttaagtcctgatagccaaaagtatactttttcaggtataagtcgttaccacgttgatttttttaatggtttaaccgaaggtgttcgtccacttggaccaattttgcgtgaaaagctcagtgcacatcaagtatcaacggagctttacttaggtcagtgggatgacattggcacaccagccagattagacgaaatcaatcagcgtttcgctttgcaataacaacagaggtttgccaattatgtggggaaaagtacttggtttttgttttggctttatgtttggcaagtttatcggtgccttactaggcttatacttaggccatatgttcgatcgcagcttaaaacaagactttgataaagccggtgggttttctggtttgtttaaaggcgatgatattaacgaacgtcaagcgcttttcttttctagttgttttgcggtgatggggcatattgccaaatcaaatggtcgtgttagtgaaactcatattcgagctgccagtgtctttatggacgaaatgaggctgtcgggtgatgagcgtcgtgaagcacaagatgcctttcgtagtggtaaagaaacagatttttcattaaaagaaaccgttcatgactttaaagagcgctttgctcgacgccatgatttattgcaattattcctcgaaatccaaattcaaatggccttttctgatggccaccttgcagagcaagaaaagcagctattgcaagaggtgagcaagcagttaggtatttcgcgcacccagttcgcatttttgttaaagcgctaccaagccgagtttgcatttcgccagcaacaacagcgcttttatgagcagcaacgccaacaaggccagcaaagtcgcagtagttatagtgaacaaagagggcacagtgtgccacctaataatggcatgaatcgcgcgcaggcattggctcttttaggcttaaacagtgatgcatcggcacgagatattaaagttgcctatcgaaagctcatggctcagcatcaccccgataaattagtatcgcaaggtttaccaaaacacatgatggaagtagcggtaaagaaaagccaagatattcaagcggcttacgagtatttaaaaaaggcggcgtaaaaatccatcaatttctttgagtagcctttcgtgctgctctggctctgaaggcacaccaaataactctctttgtcggtagtcatattttgcgtgctttctaacccaacgttttctatcttttacgctttgcagtgtgtcagggttaccttcactgtaaaaaatatccagtaatggtgggctgatagttgaaagcgtggcattaagatgctggttacgaatactgttaggtaaatagcttcctaagctaataaaggcatttagttcgttatttggaaagctagcataatgctcaatcaagagccctgcactggcaccttgcgccacgacaataatattgccaccttcatccatggcactgttatacaaagcattgaatctagcaattaactttagtttgtaatcatcaagcactgcttcgctaatatttggttcaccagttacaaaatgaggtgcttgttgtgttttagctggtggagctgagtcagcttgctggtcattttgtgttgttgactcagtttcagaattctcagtgggctctggcatcgttatatcagcagggtgccagtcaatgtcaggcatggtcatggcaagagtcgcatagccaatttcatttaactgcttacgtaaaaagttgattccggcattattagttggaacatgctgccaatcaggaataatgagtacaattccgcgttgactcgctgccatagattggcgatataaactaataaactcatcttcaccggcaagcagagtacgtacttcatcacttggtaaaaagcgttgaatatcgttagtgaccaaacttgaccaaggagtgggtttaataaaatcggcagcattcacattacccatcaacgcaaaacaggctgcgtaaactaagcaatgtgcgggttttaacttcatgccgaaatttcctgagtcttaaattaaatcagtgattaaattaactatcggcagtgttggtaaaatatttagctaattgtcttaaaactcaggagctgcctcaaaaacaagcgtttcaccactggcagggtgagctaaggttagcatttcggcatgcagttgtaagcgaggagccatggcgaatgcttcggggtgcgcatacaatttatcgcctaaaatagggtgacctaaagacaacatgtgcacacgtagttggtgagagcgccctgtaataggggtcagctcgacgcgagttgcattctgttcatactcaagcactttaaagtgggttaatgacggtttgccattgtcgtggtcaaccatttgctttggtcggtttggccaatcacaaatgagtggtaaatctaccgaaccagtttcttgctcaagcttaccaaatacacgagcaatgtagcgtttcgcggtttttctatcttgaaattgaatgcttaaattacgatgcgcctctttgtgcatggctaaacaaataatgcctgaggttgccatatcaaggcggtgaacaattttcgccgttggaaaaacgcgattaatgcgagcaataagacaatcggcgtgttttggatcttttcccggcacagtaagtaaaccacttggtttatttacaataagcaagtcatcgtcttgataaacaatacttaaataaggtgtcattgggggattataattgagtaacacagccagcctcgatgatatgcaagggcgctattttaaaggagtatgagcacatacacaatggcagtgctggttttcgagtatatgctaacaagtaggactctgattatttccccttgttttgtttggcataaaaaacgcgatgtgaaagcacatcgcgtttgtagttttgagtttagctatttaacgttagtgtgaaacgacaattaaacgaatagcatccagtttaacttgggctttttcgatgtaagtcgtgagttcactgcgttgcttatcaaagaagctaagctcttcgtcacgaatattcgggttgatttgcttaagtgctgttaaacgagcttgttcttcaccaagggctgtttgcattttctctagtgattccgcacggagtgtttcaagcttagtttgtgccatgccttgtgcactggtgatcattgggtgaatggcactttgtaacgcactggctaacttacttgcagtttggcgaccaactgcagacagctgctggttaaaggcatcaaaggcaacattgtcggctaagttattgctgctcttatctaataagatacgaattggcgttggtggcaagaagcggccaacctgaagtgctttaggcgccatcgcctcagcaatgaaaatgagctcaacaaagaaggtaccagcaggtagctttttgtttttcagtaacgccacagaggcagtaccaaagtcatcatcacaaatcatatctaagctgccttgcaccatagggtggtcccagctgatgaaatgcgcgtcttcttgcgaaagcgaggtgctacgatcaaacgttactgtgatgccatcatctttcaagcatgggaaagacggatttagcatgtggtcagttggctttaagatgatggtattttcacctttatcctcttggcttacaccaaaggtgtcgaacacattgatcatataacttggtagcgtgaattgatcatctaactcttcgatatcagcaacaagactttcggctcgtccttggccacttgagtgcagctctaataaacggtcacgaccactttccatttgtttacgaagtttagcattttggctggcaacttgttctagtagtgggtctagctcttcttcgtcacagttgtgtgcaccaataaactcaagtagttcttcgccatactctttatacagcatttgtcctgttgtcgatgttgtttcaaacgcatctaagccttcgttgtaccaacgaagtaacacttcttgtgcagtgttttcgaaatacggtacgtggatgtttacgtcttgcgtttgaccaatacggtcaagacgaccaatgcgttgctcgagtaagtctggattaagtggtaaatcaaacagtactaggtgatgcgagaattggaagttacgaccttcagaaccaatttcagaacaaagtagaatttgtgcgctgtcgtactcatcggcaaagtaagccgcagcacggtcacgttcaacaatcgacatgccttcgtggaacaccgaggctttaattgcttcacgctcacgtaaaatttgttctaggctaagtgcggtttcggctttagcacaaataagcagtactttttcgtgcttaagggttttaagtgtttcaatcaaccaatcaacacgtgggtcaaatgcaccccagctggcattttcaccttcaaactcttggaagattttttcagggaataaagcacgaagtgcagttagctcagcattttgaatgccgcccatattacctagtaccgacattgccgttttatattgtttaggcattgccattggataagcatgaagcttacggcttgggtaaccatcaataccgctgcggctatttctaaataaaatacggcctgtaccatggcggtctaacagcattgataaaatttcgttacgcgccgtttcatcaccttgctctgcgttagctaaaaggtcagtgatgtcggtttcttttaatagctcttttaatgttgctcgagatgtatcatcaaggcctttttcacccagtaattggttggctgcttcggcaacctctttgtagttactttcttcttctacaaacgcatcgtagtcgtagaaacgatctgggtcgagtaattgcaaacgtgcaaagtggctacggtgaccaagttgatctggcgttgcagttaataagataaggcccggaatgtcttggcttaactccgccatacgttgatattctgtgcttggcttaccattattgatacttaaatggtgtgcttcatcgacaactaataaatcccaatcagccagagttgcttgctcaaaccagcgttttttcttgcttaaaaactcaaggctagtaagtactaactgttctgtttcgaatacgtttggtgagtctgcaaatgcttcatcacaacgttcttcatcaaaaatagaaaaacgtaagttaaagcggcgtagcatttctactaaccactgatgctgaagattttcaggcacaacaatcaatacgcggctagcacggccactgatgatttgttgatgtaaaatcatacccgcttcaatggttttacctaaacccacctcatcagaaagtaatacgcgtggcgcaaaacgtttacccacttcttgggcgatataaagctgatgcggaataaggtttgcacgctggccaattaagccttttaaaggtgattgttgacgctcaaattgatgctgccaagtttggtagcgaagcgtatagcggtcaaaacggtctacttgacctgcaaataaacggtcttgtggtttattgaatttgataaagtgatctaaaaaggtttcttttaactgggctttttcaccattatcaacgcgagtgccgtgatagcatagtaactcgccctgctgttcaacagactcgacttctaattcccattcttcaacgctgcgaataatatcacctggattaaatgcgacacgagtaacaggtgcttcagttaaagaataaactctgttttctccactggctggaaataaaatgctgacctgacggccttcaagggcaacaacggtgcctaatcctaaatctgactctgtatcactgatccaacgctgacctaaggaaaaattcatgtatgtctcgtctatgaagaaaaaaggcggctatgttacctgtaacgccatgctacttcaaggtagtaaactcgccgcacacaattaaatttagtcaacctttttaagtcatttttacgggtgaaaatattagtgaaatctgtatgtattttaaccatttaaataattgtatatttgtttgtcataaaaaggacttttgtcgtaaatagactaaactgagtatatacctaacgaataaatcatagcttcatccgccgcttgtttagtttattgggtatagcataaaaatcataaaacgtaaggaaagtgctatggaaaaagcttcgaaccttgatagtaaaatgtatgtgctcgataccaatgtattactccacgaacccctcgcttatttatctttccaagagcatgatgttgttatccccatgacagtattagaagagcttgaccatattaaagatagaaaacacgatgttagtcgtgacgcccgtgttgctattcgtgggttagatgaagtgttaaaagacgcgtctcctgagcagatgttgcaaggggtggcactgccgagtaataaaaaggcgaaaacagagtctcgaggccgcttaattatcgttaatgatcacttatttgcagacagtatttcgggtttaccaggcaacgaaaatgaccatcgtattatcaattgtgcagtgcatttgcaaaagcagcacagcgatagcaaagtggtgcttgtaactaaagacatcaatatgcgcctcaaggcgaagggagccggccttaaatttgttgaagactacagaactgaccaattaattgacgacatagccttactgaccagcggctataaaaaaattgacggagacttttggcaacaggttggtgagtgtgaaactgagcagcaaggccgagatacttatcaccacgtagcaaaaaatacgattagtgatgtgttctgcaatgaatatattttagatgatagcgatcactttgcggctcgagtaacaagctacgatgataaacaaattactttaaaagatattagtgttgagcgtttgatgagccataccgcttggggtgtaaaacctaagaatgtgtatcaagggatggcacttgatgcgctacttgacccaagtatagaactagtgattttaacgggcccagcaggctgtggtaaaactttgcttgctcttgccagtgcccttgaaatgatcattgaaaaaggcatttacgataaagttatagtcacccgtaacacgccagaaattgctgaatcaattggctttttacccggtactgaagaagagaaaatggccccttggttagcagcaattaccgatactttagaggtgttgcataaaggggatgaaaacccgatttcgagccgtaattacattatggaaaaagccaacgtacagtttaaatcggtgaactttatgcgcggccgtagcattcaaaacgccgttgttattttgcaaccccgaattggggatattttaaagtttttacccccttgtttttattggcctgtagaaaaagtaaaaagaatttccaaaaaaattgattaccttagctactctgagcagtctctcaacaataaacctttactcaaaatttgtaatttacaagaaaagtacaacacaaagcctagcaacgattcaatcttttgggaggctgcgtaatgaaaagctctattgataatcgaaatcctcgtgtactagacacatctgcattagtacatgatccaaaatctatttttagctacaaagatgatatttacatctgtctaactgtccttgaagagcttgataacctgaaagaaagaactaataaatcggtaagtgccgatgcccgtatgtgcattagaatgcttgaagacattataaatggacatacagccgaggaaatggaaataggtattcctttaccatctaccgaaacagcccagagaggaaagcttttcattggaattgacactcaattggatctggctaaggagttaaagcacgggataggaagtgatgctgataacagaataattaattatgctttatatcttcaaaaagaactcaataaagacgtaataattgttagccgtgacattaatatgcgcttgaaagctcgaaccgtaggggtcatggcagaagacgttgccgtagataatcaaatatcagatattgatcttttatacacaggggtacaagcctttaaaggagatctttttgatcgaattaaatcagacaaagacttcaaggtttcaggagaagtttatactttcccaataagtctatttaatgatgaagttcagccaaacatgtattggtacgatgaagctggacacattgggcgaatttcagaagtaacagatactgaggtattcacaaagctattgcctcgtaaacaagaaaaagtatggggcattttgcctaaaaatcagcgtcagtcggtagctttaagccaattaacagacccttactatgatttaaatatcatccttggtcctgctggctccggaaaaacttttttggcagttgcttcggcgctgcatcaagtattggagttgaaaaagtacaaaaaaatcgttgtggtgcgctccagagactttatggacgacgatccgggattcttaccgggggatttaactgaaaaatcaatgcctcttctggcaggtattactgacgcattaatttcgatgcactcggatgataatcatgaaggaaatgtctacgctacagtcgagcatgtgattgaaaaagccaatatagaatttactagcatggcttattttcgtggccgttcaatagacgatgctgttttaatcattgatgaagctcaaaacatgactagagcgcaaatcaagggcatgttaagccgtggtgggaaaaattgtcggacaatcgtattgggcaacctagcccagattgacgataagtttgtaacacctgcttcttctggtgcaagtgcggctgttaatgtgtttcgtcattatgaaaaaggatcagtgctgatttttgatgaagtagagcgtagtagcttggctgaattcactgaaaagaatatgtaggcatcaaactaccattcacatttccttataatattgcgacaatggccactgctttttgcagtggcttttcagagaagcccgttcccacgaaaacaggacgaaatggatttactctgaactaaaagattaaatattcacataaaaactgagtgacataggtgcgtggcctagcgttgccgttttttggtgtattgatgtcttttaaaaaagaagacctgctagtaaatataaaaaggcaggcaaaacgattatctaaattattaactattccccttggacaagcccaagaaggggcagctatttgtctatatggctgtgacagttacagcgatttactagtaaaaataaaagctgaatcctttgacaacccaatgatagcactgtctgcactctcaccaaactcggaaatatttttagtaaaaatattagctagccacctagatagcattattggaaattttgaaaaaaaatttcccggctccaatataaatgaagagatggtcgtatccttgtttgggcttagcttttcagagttcaaactcaaaatatctacctaaagttgtacaaatacgtaagttgtcattttgttttttggcgatattataataagaaggctgaacggacagcctacgcctacacatgtttttcgccttgaaaaacgtgaacagtgaagcggagcatccgtaaaaatttggttatttgaacaataaataaagcaatgtgttggtaggccattgtttattagaaagttgtttggagaactaaatgatctcactttatcaattaaagaataaactcaataaacaagcaaaagagtttgctgagttattagagtttcctgatctttacgcccaaggcctgtgggctagaggtgtttataactgccctcatttttctgatacccataatagcctcactgaagcatttgaacagaaaaaactggattcaattctaaagcacgattccctgaaatacttaatgatcaatgaatacgatgatcaagaaattattgaatcgcttcataaagaaattgagtcaatggcaaaccgtattgaaagcctgatgctggtagatatcgaaacattagagttagtttcagtgatataccaagtattagggttgccagaagatgccaagtttattgtaaacactggtgctgactttaggctggagtggcgaccatatttcgatgcttttgatgatccgttgatagttcaatatgcagatttaaaagttcatggttgttatttcaggctcatagcttcaaagtttccggttgaaaagctttccttgaatgacattaaaaaatacatgtacatcaatcatgtaaaccatgatagtgagttcgaaggctgtatttctgaaggaaatacattttctaagcatgagcactggctggtgttgacacttgaattattccgtagcggcaaagtaaataaggctcagttcaatccaacaaccttcaaaatcgaaggtatgcgctatttggtatatggcttcccactgattccttcctttgtatctgattggcacaaacctgatttatgtctacaggttaaaaatctagatggtgatcaaaagttcattgttcgtatcgatcagcaagctcttgttttccatgcacgacgtgtcgataccaatttttttaacaccatcgattatgaaaaatatatttcgttgtatcagtctagcgttctgtcacattttgatgctgacaacaatttactaaaagttaatggagttaagtaccttagttttttccgcccgttttgcctagaagataagaaggaagcacaagcatgagaccaagagtaaaactaactaacgcaacacttatctcaattaaatctgacttagaagataaggttgaacaggtgctttacgctacttttgctgaggatagtaagaacggtaaaaaaggtgaggctttgttttccacgaaagtcatggaagtaaacggtcttgaatatagaacttttggtgctgacttttatatcttagatgcagaaccccaaaagtttgatgtagatgtatttgagttcaatttaatgcatgagtgtatgtactctccaaatgagctattagagttgcgagaaatgctccctgctggctattagtagggagtaacaaatggacaaaacatatttaaaggatgcttacatactctcggtctatgactataaagactttgaaaaatcatttcttggggagtttttgtcaggggttgttattgacgatgaaacattcagatttcggccatttcagcaaatcgtgacttcaaagattgttagcaaatctgctgatgaggataagttagaaatatacacacatagtgggagttgttatgtgattgatgctgaccataagttaattgatatttcgtttgttgagctggttgttatgagagcaggagcttattcggcagatcgagttttagaaatgagagagcaacttaagtctcaaaataaaagccattgaatagcgaagataagaagtctgatgagattattatttgtacactaattcatattatttgtcacttacctctttgaaaaaattgacgttagtcaaatattcataaatgtttacatgacatcaatttacttattcgaaaatttgtattagcatagaccatgtatatttttatgagaattttatgtctaaagcattttcaaaagtcttagtaataacgcttatgctggttgcctttgtagggcaagcatttgcgtattctgctatgccttgcgaaatgtcatcaggttctcacgaatcacacatgaacatgaacatggatcatggtgatatgaataaaagcagtaatggtcaatcagaagattgttgtgacgttgaatgtatttgtcctgcaaatgcttgctcatctacgacagtcctaaattccagtgttgactcgacagatattcaaatattgcgtgaatctgtagctgctctgcaatctaaacaacctcattcaatttccacttccctttatcgtccaccaatttttgcctaatacaggattagtgcgtctaaatttcgcgcacatgtaattaatttttctgttagtcaatatagcgtcgtagcgctatagatattttccagcgatgtctgggggcaaaaatgatcaataagtatttaaaaatagcagtagtaatgctgctttcacctgcgtttgcaaacgccaacgaacataaccatgcacacaataacgacgtaacacctttggagttaatcgtttataaaacccctacttgtgggtgttgtaaaaaatggataactcatattgaagacaaagggatcgttgcgcattccaaagatttccgaaacatcggcaacatcaaaactaagtatggtatcaaacctaattaccgttcatgccacacggcagtgagtagaaatggatttgcctttgaaggtcatataccagctaaatttattcagcagttcttatcagaagaacatcccaatgcgattgggctttcagttccagcaatgccagttggctctcccggtatggaagtcgatgaccgctttatgccatacaacgtgttaattctatttaaagatggaacgagcaaagtctatgcaaaagttaagacatacgaggagcaattctaatgaaattgaactcttcaaaccttacttcactttcaactgcattaatactcggcttatctgtattctcagctcaagctgagaaagtagtgtcgcttgaacaagctatcaccttagctcagcaaaatgatccttggcttcatggtagccgattgaaacaaagtgcagttgaaaatagaagtattgcttcaggtactttgcctgatccgaaagtatcgctagggataatgaatttaccaacagatacttgggatttagatcaggaaggaatgactcagctaaaggttggcgtctctcaaatgtttccgagaggcgacagtctagagatcaagaaagaccagttacaaattgagtccacgaaatttccactgttacgagaggatcgtaaagctaagttgaaaagccaagtgtcacaactttggttagatgcttacttagcccaacaaactattaaattgattgaagatgattgggcgctctttgagcagatggcggaagttactaaagctagctactcaaatgttgttggtaaaaccagacaacaagatgttattcgtgctcaattggaaatcgtgcagttagatgaccgattaacttcgcaaaagcagaaactagaaacaacaatcgctcgccttaatgagtggcttcatatctacgatgctgctggcttgaatgaatcatttaactttgatacgcaaccattagagtttagggtttctaaaaagttgcctgcaattcatttgaacaattcaacagtcctaaaagcatctaattactcaagaaatctattggctcaggagctttcgaatcacccagccatacttgcaattgatataaaacgcaaagcttcagaaaaagcagttgagttagctaaacagcaatatgaaccgcaatggggtgttaatgctagttatgcctatcgggacaatatgccctctggtgatagccgagctgatttattttctgttggagtaacgtttgatttacccttgttcaccgagaacagacaagataagcaagttgcagcttctattgcagattcagagactattaaaaccgagaaactattactgacaaagcaaatgatcagtatggtggaaaaggagcttagacagcttaagcgtttatctgataggcaatctatctatcaagaacaactccttaaacaaactcatgaccaagcagaagcgtcattgacagcttacacaaatgatgatggcgattttgccgaagttgttcgagcaagaatcgcagaattaaatgccagaatatcagccttaagaattgatgttgacgcacttaaaacagttgctcgtatcaactatttctttgcacgttctcaatctaactcaaatgctgaacataagtcgatgcaaacttcacacaaaactaatcagcacttatccaatcagcaatttggagaaaaataatgtcaacgaatactaaaacaattattgccatcatcattggtgctgcgctaggcgcaggagtattgagcttatatcaaggtgcagggtcaaacagtaatacagatgaaacaacatcagcagagaaaaagcctctgtattgggttgcaccgatggattctaattaccgccgggacaagcccggtaagtcgcctatggggatggatttaattcctgtgtatgaggaagaatcatctggtgatgattttggtcccggagcagtaaaaattgcgcctcatgtagtgaataacctaggggttcgcactgcacctgttgagctgaaaaatatgcatactgaaatatcaacggttggttacgttcaatatgatgaagataagctaattcatatccacccacgtgttgatggttggattgaaaaactctatgtcaaagcggcaggtaaccctgtagagaaagggcagcctctttatacactgtattctcctcagttagttaacgcgcaagaagaacttttaatagctttaaagcgcgacaatagttccttaatttcggcggcgaaagatcgccttaaagcgttacagctttcagcagatttcattcaaaagctagaaaagactagaaaagttcagcaaaccatcaccttttattcaccacaagcaggtgttgttgacggtttgaagattagagaaggcttttatgtcaagccgggaaacaccttattaagcattggtcaactagatcaagtttgggttgaagcagaagtgtttgaacgtgacgcagccttaattaaagaaggactgcctgtatcaatgacactggattatttacccggagaggactgggctggtgtcgttgattatgtttatccaacattgaatagtaaaacacgcacactcagagtgagactgaagtttgacaacccagactatcaattaaaaccaaacatgtttgcacaagtctctattcacgctaatcaagctgatagcacgatactcgtacctaaagaagccgtcattcgcacaggtaaacaagacagagttgtacttgccttgggggatgggcaatttaagtctatcgaagtgacaattggccgggttgatatcgatagtatcgaaatcttagagggtcttaatgaagatgatgttgtggtgacatctgctcaattcttgattgattctgaatcaagtaaaaactctgattttaaacgaatgactcatgacgaagtgcctagctctgtttggatggaaggcgaaatcaacagcgtcatggcgggacatcgtatggttaatattactcatggtcctgctgaggcttgggattggcctgaaatgacaatggacttcgatgtaggtgaaaaggtagatattgattcactgaagtctggtcaatctttgcactttgaagtgagcaaaaccgaagagggtggatatgaagttactggaattcatatcatgagtgagcctgctgatatgagtgaagaagtatcatcagcaacagtatcaggtttaattaatgcgattgatattgatacacggattctaaatattagccgaggcccaatagagaagtgggatagacctgctgcgacgatggattttatcgtcgcggacaatatagaaatagttgatttcaatgttggtgataatgtcactttcacttttgaggttagggatgacttagttatcactgaaatctctcttgaatcagatgaacaacacggcaaggaaaataaagctgctgttgatcattctaatcattaagtgggagaaaaataatgattgaatcaattattagatggtctatcggcaatcgtttctttgttttgttgattaccttaattatcgcgtttggtggtttgtattcattacaaaaaacgccagtagatgcactcccagatctttctgatgtgcaggtgataattaagacgagttatccgggacaggcaccacaagttgtgcaggatcaagtgacatttccacttactacagcgatgctatcagtgccgggggcgcaaactgttcgtggttactcattctttggtgattcctacgtctacattatttttgatgatgatactgatttgtattgggctagaagccgagtacttgaatacttaagccaagtagcatcaagcctgcctgattcggcaaaacctcaattaggacctgatgcaacaggtgtgggttgggtatacatttacgctttaacagataagtctggaaaccatgatctaagccaattaagaagcattcaagactggttcttaaagtatgaactacaaactgttccgggcgtgtccgaagttgccgccgttggtggtatggttaagcagtatcaagtgcaagtagatcctgacaaattgagagcttacgatattcctctaagtttaatacaaatagccttacaaaaagggaacaaagaaactggcgcatccgttgtggaaatggctgaagctgaatatatggttaccgcaacggggtatattcaatcagttagtgatatagagaaaattccacttggtattaacgaacaaggcacgccgttgcgtattggtgatgttgccaacgttaaccttggtcctcaaatgcgccgtggtatcgcagaacttaatggcgaaggcgaagttgttggtggtgttgtcgttatgcgctttggtgaaaacgctcaacaaaccataaatggggtaaaagaaaagcttgagtcgctcaaatcttctttaccagagggggtggaggttgtccctgtctatgacagatcgaagttaatagatcgtgctgttgataacctttggagcaagttgctagaggagcttgcggtcgtggctattgtctgtgttgctttcctatttcatcttcgctcatcaattgtggcagttgttactctaccattaggtatattggtgtcattcatcatcatgtatatgcaaggcatcaatgccaatattatgtctttaggcggtatcgctattgctattggtgcgatgactgatggtgcaatagtgatgattgaaaatatgcataaacatatggagaaaacaccactaacagatgaaaaccgttggcaaattgtagctaaggctgcgagtgaggtaggccctgcattattttttagcttgctgatcataactgtctcattcttacctgtgtttatcttagaagcgcaagaaggaagaatgttttcaccgctcgcctatacaaaaacctatgcaatggctgcatcagcaggcttggcaataacattggtgcctgttttgatgggctactttattcgaggcaaagtcgtctctgaaaagaaaaacccattaaatcgattattgattgctatctacatgcctgttttaaagcaagtcatgaagtttccaaaattgacaatagtcgcagcagtattagtgactatcgttggtttttggcctgtcgataaaattggtagtgaattcattccgccattggatgaaggcgaccttatgtatatgcctactacatatcccggcatttcaatcggtaaagcaagagagttattgcagcaaacggacaagcttattcgcactgtgccagaagttgaaaatgtattcggtaaagtaggacgagctgaaaccgcaactgaccctgcgcctctaaccatgattgaaacctttattcaattgaagccacgggaggagtggcgagaaggcgtgacaactgagtcgttaaaagctgagtttgataagttggttaaatttccgggcttaaccaatgcttgggtcatgccaatcaagacccgcattgacatgttagctacaggtataaaaacgcctgtcggtattaaagtcgccggaccagaacttgatgtaattcaggatatcggccaacaaatagaacaactcttgccagaagtgacaggcacagcgtcagtttactctgaacgagttgcaggtggacgatatatcaaggttgatatttcacgagataaatcaagtcgctttgggttaaatatcgaagatgtccaacaagtagtttctactgcgattggcggtatgaatgtgacacaaacgatagaaggtcaagagcgttaccctgttaatctgcgctatccgcaagattatcgagattctcctgagcagctagcacgattacctgttgtaacaccaagtggtcaacgcattgcactaggtgatgttgctgatattcgagtagagaatggcccaccgggtattaaaagtgagaatgccagaatcaatggttggactttcattgatattgatagcgttgatgtaggtacttatgttgaaaatgctaaagaacacttagcaaataacctgacattaccagcaggctattcaattacttgggctggacaatacgaatatatggaaagagcgaaagaaaagctcacctatgtattgcctttaacactcgccattattgttattctgctttacctgaatttcagagcgtttagtgaagtggctatcattatcgttaccttgccgatggcaatgatcggtgggttatggttgatgtatctagaagggtttaatttctcagtagctgttggtgtgggctttatcgctctagctggtgttgcggttgagattggcgtgataatgctggtttatcttaatcaagcacttgctgagcttaaggaaaaagcggtggagcgagcagaactcatctcagatgatgcatatcaagatgcattattgcacggtgctggcttacgagttcgtccagtaatgatgacggtagctacaatcattataggtttaatgcctattttatatggtactggtacaggttctgaggtcatgagccgcattgctgctcctatggtaggcggaatgacaagtgctgtgctgctcacgcttattgtactccctgcaatttactcaatcattaaaaagcctgaagtaaatgcctttaacaaagagctttctaacgtggagcctgagaataatgcttagcacggctagaaaatatcacaaatggctaatggcatttgtcggaatacaattcctcttctggtctattacaggcgtgtatatggtgactatggatattcactatatacacggcgaaaccttggctaagagtgaggaagccaaaatagatttagcaagtatggattactccattgtaaagctagctgcggattatcctaaagctagccaagttacacttactcaaagtatgggccgtcctttgtattcttttattaatggagaaaatggaaaagtagcaatagatgctaaaactggagctgttcaggcccttgtagatgaaaccaaggctaaagaaatcgcacaataccattatgcgctgaatcatcaaatcgacagcataaggttgattaagtcagcgacaaacttgcctgctgagttgtccccaaggcatttacctgtttggagagtgacgtttgagcaattctccacaccgacattttatataagtcaacaaacaggatcacttgttgccaagcgtcatgattactggcgattgtttgattggatgtggcggttccacattatggattactatgatggagaaaacgtatcaaactggtttttgttcttggtcgcaactctaggtctaatgggagcaattactggcgcagtattgacttattaccgagtgctttccccaaataaaaagagagtcatttgatgcgactatttaagttaaatacaacgatacacaagtggctttctttatttgttggtttacaactgcttatttggttgggaacgggcctttacttcaatttgatggatcacagtaaagccagtggtaatgaacttagagttcattctcatcatgaaggtagcattacaggctttgacctattccctattaaagacattactagtaatgctccgcaggaagtaaaccttatatgggttttacatcagccttactatcattttgtgttcgataaggggcagcatagctatcaagagcgccactcaaagctatttgatgctgtaacaggaaagccatttaatttgtctgaagaacaagtactaactttggcaaaaaactcctactcaggacagggtaagttaactactccagtgttatctcaacctccgttttctgatcacgtaaggcagcaaaatcctatgtggcaagttgccgttgaggatgagaacaatacaactatttatttagatagtattacaggtcaagtacttcgccatgccaatgatgatttcagattgaaagatctgatgatgaagcttcactttatggactatggcaattctggaggatttaaccattggttgatcattgcatttgcttttgcaacgctattcctttcaattactggtgttacttggctgatacaacagtatagaagtggtttactgaagctaggttggggcactaacaggcaaaaagtggcagtgacgttttccaatgaaaatactattactgacatctcagcagttggtcgctcaactgtattagaagggctagctagttcacatgtataccttccttcaggttgcggtggtggcggtacttgtggcaaatgcgtgttcttaagttcaactaaattacctatcacactatctgaacaggaacatttatctcaggagcaacttaaggaaggttatcggcttggatgtcagcataggttctctgaaattagttcgattgaagttaatactgatcgcaatattgaaaatcatgagctagttgtggttgcgactaatttcattactccttttatcaaggaagtgaaatttaagctgaaatcaggcaaacagttggcatttaaagctggtgcatatatgcaatttgatgtgccagcagggatgaatagcttacgtccagatgatatgccagagtgctatgaaaaatactgggatagctactatcatggaaaattttctcataacggtgtaactcgccactactcattagttaactttgacgaggagtctgatgagttaatgtttaatatccgttggcagaccgcaaagaatggttttaaagcaggaataggttcaagttatttaggttcactccaagtaggtgaaacgataactgcaagaggccctttttctgatttttatgccacttcaaataaaaaagttagtcgcgtgtttataggtgcgggttcaggacttgcaccactgaggtctattatttttgaacagttgaaaaagcataaagataaaagtggtttgactcttatctatggtgcgcgaactgaagatgacttgctataccataatgaattgaagtcactgagtgagaagcataaaaacttctcttatattcctactctttctaatccttcagaagaatggcaagggcactcaggctatgttcaaaaagtacttctgccgtatatgaaccaaaaagcagaactgcatttggctgagttttacttgtgcggtccagaagcaatgatgagtgaagtggaaaaaataattacagatgctgggattccaagtaatcaaattttcaaagataaatttagtcgttaatccattaaataaatagaggtatatatgaaaacattaattaaacttttaaccataatcagtgttgtttttagtagtgcagtatttgcacatgtgcatcttgaaaaaagcgtgcctgctgataatgcaatgctaatgaatactccagaaaaattgacattgggatttagcaaagaggtacgtgtagttaaagttacgttgaaaaataaaaaaggtgaaaatattaaatttgactttaaaccatcaaaagaagcttccagagagttttcatgggaactacctaaattagctccaacaaactatatcgttgatgtgacctatttaggtaaagatggacataaaatgaaagatagcttcggctttatggttcattagtaaggctgtgtgattgatatggaaatgtatatctggaatacagtcattgtactgtcaaaaattgtattttacgtcggctttgcctgtattgccggctatacatttttcagacaaatttttgagcataatgaatctcatagtaatgctgtaatagcgaatttaacgtggacaagaacttatatagttatggctttgatcgctaatattacttggttctttgccagtactggtgcaatggcagaagagggaattcagggggcgatagacgctgatatattggctattatgtgggactcctctgtcggcactggagctttgcttcgagcgcttgggctagttaccgcaataatcgctttagctttaaggttcaaactcgctgtgaactcgtacttaaaacaaagcgctttaatgttgagtttattaatccttgcatactcattcacgttactgggtcatatttctgagttaggcacaattgaaaaaggcttgcttattttgcatgtgctcgttatggcatggtggtttggggcgttattgccactaaaacaggcttgccatcagctaagttatgcagaacttcatttgctgatggaaagctttggcaaacaagcaagttttacattgagcctattgttggtagcaggcctctggctcgtgattcaattggtcggaagtcttgatgcactaataagctcaagttacggacaaacactgttgtttaaattggcccttgtagtgtctattttggcacttgctgctaaacataaactaatactcgttccacaacttaaaaatagtcaaggcagagaggctttatctaaatctatctcgatagaaatggtagtagcttttgccattttatctgtaacggctgggcttactagtgttgttggccctgcaaattaaaacctaaaagagagaatgaaaatgaaaacaataaatatattactcgttttattaatgacgtttagtttcgcagcaaacgctcatggtgataagaacaaagacaaaggtttgtttaaaggtatagataccccagccgcaaaagttgttttggcatttcatcaagcacttgaaactggcaatcaaaaacaggctagagcgcagttagcggatgatgtcaccattttcgagggaggccgcgttgaaaggagcgctgatgaatatgctcatcatcatatgttgtcggatatgaagtatttagcagcgatgaagagcgacacacttgaacatcaagtgacgatacttggaaataccgctatctctgcgtcgcgcagtcaaactacaggtactcataaaggtgttgaacgcgattatcaaggcatggaaacgatggtgctggaaaaacaaaatggtgaatggaagattaagcacattcattggtcacattaatttattgttcaaacaacggagagtaaaatgagaaataacaatccattacatcaagtttctacgccacgtagacgctttgtacaaggattagctgctggcggtgtattagctgcttttccaagtgttcttcatgcagcttcatctttgcttgctggaacttcaacaggtactgcgcccgaactaagtggggaagtcatagatctggtgatagatgagtcaccagtaaacttcacaggtgttgtaagaatggctacaacaatcaatggctcaataccagctcctaccttgcgcctcagagaaggtgatgacgttactatcagggtaacgaataaattatcagtgccgagttcaattcattggcatgggatcattcttccgtatcaaatggatggcgtaccgggtattagctttaaaggtataatgccgggtgaaacctttgtttataaatttaagctgcaacaaagcggcacatattggtatcactcacacagtggttttcaagaaatgacaggtatgtacggcgcattaattattgagccaagagaaaaggatattattagtgctgacaatgagcatgtcatccaattgtctgattggactgatgatgacccaatggatttgtttcgcaagttaaaagtacagagcgatgtatttaactttaatcaacctactgttccagagttttttgatgacatttcaaatagcagcgtttcaaatgcgctacaacgccgggaaatgtggaataaaatgagaatgaaccctacagatcttgcagacttatcagcatctgcaatgacttttttaatgaatggttgtgcgcctttgacaaattggcgtggaatgtttaaagctggcgaaaaggttaggcttagatttattaacggttctagcaatacgttttttgatgtaagaatacctgagctgaagttaacagttgtacaagctgatggacaaaatgttgaacctgtgacagtagatgaatttagatttggtcccggtgaaacttatgatgtacttgtcgagccaaaaaatgacgcatatacgatttttgcacaaagcatggatcgctcaggttatgctaaaggtactttatcaatggcacctaacgttgatgcaccagtaccttctttagaccccgttgagtggttaacgatgacagatatgatgggcaatatgacccatgatagtgtgcattctacaatggctgatacggcaggtatgtcgggcatgaattctaataaaatggatcatagtgcaatgggtcatggagcgatggcaatggatcatagtaaacatggaatgactaaaaacccattagctgttgctagcactaaagtgcgtcatgcaaaaacagagtatggagcttctgttgatatgcgtgttgatatgcctagaacaaaccttgatgatcccggtataggtttacgtaaaaatggacgccgtgttttaacacttgcagatttacattctcttgagggaattacaagccagcaagagcctgaggctgaaattgaattacatttaactggaaacatggagcgttatagctggtcatttgatggcttggaatttggaaaaagcacgccagttcacatgaagcataatcaacgtttaagagttattttacaaaacgatacaatgatgacacatccaatgcacctgcatggtatgtggagcgatttggagaatgaaaaaggtgatgtacaggttcgtcgccatactatccctgtacaaccagcgcaaagaattagttttttaacaacacctcatgacgtaggtcgctgggcatggcattgccatttattattccacatggatgcaggtatgtttagagaggtagttgtatcatgagaaaattaatactaaccaatacgttaaaactattattaataggtttgccccttataagtgtatctgtatctgcaaaagatgagatgactgagatgggtgattctaaaatgcaagcacaaggtggagatgcacctaaagatgctagagaccctcatgcttatgccgcaggtacaacattgactgaaggtccttatgcactcaatagcgacaaacgactgactttggcagatgagcattcattttacgcgctactaggggatcgtcttgaatataatgagcaaacaaacgcaggtgtttttgactttcaggcatggtatggcactacttttgatagattagtcatcaaaactgagggagattttagcgaaggtaatttagaggagaaccaaacagattttctatggggccacgcaatatctgcttattgggatacacaagtcggtattcgacttgattacaataacgaaggtgaaaaccgcaaatggctagcttttggtttacaaggtctagccccttactggtttgaaattgatatgactgcgtatttaggagagcaaggtaatagtgcattttcgatcgaagctgagtatgagctattacttactcaaaagttaattgttcaaccacgagcagagttgacgctttacggtaaggatgacgtccaaaataaccttggtagtggcttatctagcagtgctattggttttcgggttcgttatgagtttacccgccagtttgctccctatgttggcgttgagtggacaaataaatttggtaatacagccgaatttgcgaagttaaatgggcaaagtactcgtgatactgcttttgttgcaggtatcaagttctggctctgatgtgaagaaatactatattgacttgatgagagctaccgcaactatattgatggtagcttttgttttttgggatttaaaccattttagttatgttaggaaaggcctagctaatagtttttttggaaagaactaagagcagtaatagtaagctacttcttgttttcagtctgtgccagtctggtgtatacctatcaaggtggaatatcagctaagaagtaaagttggcgaatggtaaaggttaaagagtcaagccaaaaaacatcgccattgaaagacgtacaatagactattttatcacttttgatgaacgggaattgggtgtgctcgggatagaaccgattgttgcaaagtactgcgcttaaagctgaacaattggaaaaatgatcccttactcaatacctagttatgagcgtagggtttttattttttttatggtgctcatgcttggcttcaatctcatgagtataaatcagacaccccttttatacttgttaagtttaagctgtttaaaaaagtaaaaagtttaggttttagttcaaaggttgatcaagatcataaaattatttttataaagtggctaatattgtaggagctaaagaaggaatgataatgtttggacttttcaggtggtttaaaatagtgataataactgtgttgcttacgcagcatagttttgctacagctaagccaatgaattgtgaagaacatcaaaatggatcttccgacacgcatattatgcaacgaagcaaaaatattcaccatcaatcaatgaatgacaatagtcactatcacactgtaaactcgcaagactctaaacaccgtcatggtgatgaagtctgtgaaaaatgtaaagctagtgattgtgtttgttgtgaggggggattttgttcaagctttcatttaaatccctatcttgtgcaagcgcaagaggaaggtatttgcaatatttactctgagctatttctacagcgtacacctctaccaaaatctggtatccatctcttactttatcgtccaccaattattggctaatcacgggatcagtgcgtctttttttcgccactcccatcaaaaatagaatgacttattcattgatttaaataatcaattgttttgaacgattagtacgatattttgaaggcactatgaaaattctcaaactattgccatttacagtacttaatgctgtcgattttggccgagatttctcttttaccaaaaaattattttttagcttattcactagaattagtacttgacctgtgtcttagacacaggtctaagctgtaggtgagagtacaaacttaggtgaaaaactaaggagtaaatatgaaagtagcagaactgtcaaaaagccttggaacgactgctgatacggtgcgctattacacgcgattgggactgttaaaacctgctaagtcagtgaacggctacaagtcatactcgaataaagaagtatcgagacttaagttcattttaagtgccagaaatcttggtttttccgttgctgatatcaagcaaattcttaatgaatctgaagatggtacaagtgcgtgcccattagtcagaagcctcatcaaagagcggcttgaagaaacagaaaaacagtttcaagcaatgttggcacttcgagggaaaatgtcttcagcgctttctcaatgggaagaaatggaagacaaagcgccgactgcaaacatggtttgtcatctcatcgaaaactttgaacaaattaaaaaggcataggaggaaaaatggtaactactaatacaaatatagaaaccgaatcaggctgttgctgtcaggcaaaaactcaatcctcttcgtgtaaaagtaaggagaatacgttggaaaaaacatcacaaagccaacagctcatcattgaaggcgctgggtgtgctagctgtgtaggcaaaattgaaggggcgttaaaggcaactcatggagtcgtcagtgcagaaatgaattttgctgataggactgtaacagtttctgggacagctaagacagaagaattgatcaaagctgttgagtcagtggggtataacgcgaagccaattgatgatagctcagcaacagatgcgcttgacgagaaagaggcggcggattgggcatattacaaaaagctaatgcgcgatacgtttattgccctttcactcggcgttcctttgatgatctacagcattgtagttggagaaatgacagttgaaacaaaccttgaacgcatgtcttggctggttgtcggtattttaacttttggtgttatgtatttttcaggtaagcatttttatgttggcgcttggaaaagctttaaaaaccactccgctaatatggacacactaatagctttgggaacaggtacagcttgggtgtactcaatggttgttgtgtttgcacctgacgccgttccattgatggcacgacatgtctattttgaagctaccgccatgatcattggcttaattgatttaggtctagcattagaaataaaagccagaggtaaaacctctgaggccattaaacgtcttatcggcttgcaggccaaaacggcaactgtagttcgtgataataaagaggttcagataggtatcgaacaggttttgcttcatgatgttgtgaaagtaaagccgggtgaaaaaattcccgtagatggcgttgtattggaaggacacacctctattgatgagtccatgctgacaggcgaacctatgcctgttgaaaaagccgaagaagatgaggttgtcgctggtactttgaacaaatcaggcatgattttatttagagcgacacgcgttggtaaagacacggcgcttgcacagatcatcaatatggtgaaacgagcgcaaaattcaaaaccgccgattggccgcttggccgatgttatttccgcctatttcgttcctgtagtcatgatcatctcggtgttaagtgcgttagcatggcttaactttggccctgagccagcaattgcttttgctatcgtatcagcaactactgtgcttattattgcctgcccgtgtgctttaggcttggcaacgcctatgtctgtcatggtgggagtaggaaaagcagcagaagccggagtacttattcgcaacggtgaggcactgcaaaccgcctctaaaatcactgccatgattttagataaaacgggcactattactgaaggggcacctaaggtaaccgatattgttttagcaaaagctactgacgaaaaagacgtactacagcttgcagcaagtttagaaagcggctcagagcaccctttagcgcaagcgattgttgaaagtgctttagataaggatattgagttactaaaaattgaatcgtttaatgctattacgggttttggtgtagaagcaaactgtaacaataaagtcctgctttttggtaacgataaactaatgaagttaaaaggcatagacctcacaggctttgttggaaaagcccagtctttagccaaagaagccaaaacacctatgtactttgctgtagatggtgaacttgccgcaatcattgctgtcgcagatcccattaagtcagactcaatctctgctatcaaacggcttcaggctaatggtatacgcgtcatcatgttaacaggtgataacaaggaaaccgctgccgctgttgccaaaaaagcaggtattagcgaatttcttgctgaggtgctgccagaagataaagccaacaaggtgaaagagctacaaggcagtggcgaaattgttggtatgacaggagatggcatcaacgatgctcctgcgctagcgttagccgatgttggcttcgccataggcacagggactgatgtagctatcgaaagtgctgacattaccctaatgcgtggttcacttcatggccttgccgatgccatagcggtaagcaaagctactttacgaaatatcaaacaaaacttgtttggcgcgtttgtctataacgtagctgggattccttttgctgcgggggttctatatcccttctttggcattctgcttagccctgtaattgcaggtgctgcaatggcgttttcgtcattgactgtggtgtcaaatgcaaatcgacttcgcttttttaaagcaaaagagcattaaggagaagagcgatgatgttaattaacttattaggcttaatgttaatcgcgctgattgtttggtggttttggctatataaacccaataaaacaatcgttcaaggtaatgaagtactcattgaagtgagggatggcgtgtattccccatcctcaattcaggtgtctgctagccaacctgttaccttgaagtttatacgcaaagatcaatccccctgcgctgaaacaatgcttattccttcattggatataagcgaacagcttaagttaaatgaaattactcaaattaccttattaaacttgtcaccgggagagcatgagtttcactgtcagatgcaaatgtatcgcggtgtcttaaaagtcgtttaggagggcaatatgaaaaatcaacaccctaatttttggtcaacacctacaggctgggctgcactggcacttattgccgcagtgacctacttcttagtgcttgagcatggtcaacatacgctgcaatttcttccctacttgattttattgctatgccccttgatgcacgtatttatgcatggcagtcatggtaaacatggtcacgatcattcacatgcgcctgatgaaaaaaaggaagagagctttcaagaactcacggataaaaatgcagcctatcgcgatggctacatacaaggcttagaaaaggcacgtaaggaatcacataaaaaggagagcagtgatgaatgaaacatatgattatggcttatggtcaatggtgatactgaactcagcaatttttatcttttttgcctttagttttgtcaaaccaaaaacatcaactgattggagaagtctaagcgcgttctctgcctttattgttgccctatttactgaaatgtatggctttcctttaactatctattttctgtcggggtggctgacggagacctatccagaagtaaatttctttgcgcatgaaaatgggcatttattacatactttctttggatttcaaggtgatgcccattgggacccatttcatatagtgagtatggtgtttattgttgcaggtttctttatgttgtcttcagcatggaatgtattgcatcacgcgcaaaaacatcatcaattggctacaactggatggtatgcaagatgtcgccacccacagtatgtagctttcattctaatcatgttcggctttttattgcagtggccgacaatcccaacacttgcgatgtttccgatcttagtcgttgtttacgtcaagctagcgaaacgcgaagaagcacaggcgattgctgaatttggttcggagtaccacaggtatatggaatcgacaccaagttggatcccaagttttaataaaagtgtagaaggtaaaaatcatgaaaacgttaactaaatcaattttatttattggttcactactgataaccactagctcatttgcccaaaacaatgagcataaacatgaaggtgcgaacaaagctggtatgcatcaaggcatgacaataccacatgagaacatgggagaaatgcataaaaagatgatggaaatgaaaaaggaagtccatgccattaaaactgaaaaagatcctgacaagcaacagcagatgatggttgaacatcaccgttcaatgatgaagatgatgcaatccatgcacaaaaacatggaagaaatgccaatgcatcaacaaatcaagatgactgaacatcatttagaaatgatggagaacatgatgccgcagatgaaccggaaaatggaagaaatgaaagatagcaatcaacagcattcacacaaacattaggagaaaaattatgagcgatttagatcatagagttggcgttagagagcaaaatttagttgttcgaaatctaaagcttagcaatgtcacagaagaaagctgtgacgagttagtaaaagaaatagatcagctttttggtatagatgaagttagttacaacatcaaagaaggtgaaatacaccttgcctatgatgccgcaaacgtaagccttgatgggattgaggaggtaatccgtaagtatggcgcagatgttcatgatgattggtggacacatactaaagaaagttactataaatttgttgatcagaacatcaaagataactctgttcataagccttggagttgtcatcaagcaccttcgggggctggccggaaaaacaaatgaattcataaaaaagtgtatagataattagttagtcaaatgaggtaacagtgatgaaaacaccctatataaaagctcttttattgcttacattcggtttatatttagtgggttgttccaataccactttttatcataaatacatgatgagaggtcaggtagtagaaagttctgataatcgaactctaatctgtattggtgctaagcatggcgcagaggttgggcaaaaatacagtgttattagattccatgaaagaatagtattgagtgaaggtgaagatccctacactatcgaaaaggtaggaacggtacaaattactaaaattgtgaatgatcatttcgcaactgtaaagctagtgtctggtgacattgcagcgaaagatatggtggaacttgaaaactaataaagtggtggcgaaagccaccacaagagcataacaataaaacttaatgaaaaagctttagtgttattttgtacaacctttgagattgtttgctcagttctggttatcttgatgccagtacgacagaaaaaatgttacatatggattagaaaggtgtgggctggcatcctaggtctaatcttaacagttaaggggccgccgaatagagctatacctttacatcagcagcataatcaatgctcccgcgatcataaataagttttcagatagcgatacaaatccaagtggcacactgctatcgccgcctacacaggcacactttaactggcgtttgtcaatgtaaacggctttgaaaactgaaattgctccaactgtgccgataaacaatgaaaatggtgccactgcgagaggctgtagttgggcaaccataccaatacctgcatatgcttcaatgaagggataaatataaccatatcttatccatctcatcgctagtaaatcataagtaataaacgaatttgtgaaactgtataggtctttcagtttttgcaccgctaagagcgtcattgaaaaagctataaatagcatcagtgttctgatggagataaatgagccggaagcaaaatgttgagatgcgacagcaagaagtgcagctatcgagaaaatggctacaactggcgtgtaggttgtgccagtttgacctgcttcatctttaccaaaatactctcttaagtcatcgtatcctccgacacgctttccttcaataaaggtttgtggcgtagttttgacatcatgcttatctttgaagtcatcagcttgttgtcttgacgtgagcttatgatcttctacatcatacccttgcctctccagcaaatctttcgaccttaaaccataggggcagatatgttcgtcagtgaccattctgtacagggtagctgtcttagtcatcttagtctcctttgttcagtgtgccttcaaactttgggagcggtcgttgctcagcctgagcttgtgagctgacctttccattttcagaaatatccttaatcagccattccatttcttttatttcttttcgttgggctttaataataccatttgccaattcacgcacgcgtacatcctccaaagttgaatgctcactagtaagaatagcaatggagtgatgaggaatcatcgctttcatgtaggcagtgtcagaaattgtgctttgagagcgaacaagataaagacatatggcgaacagtattgtcgccaatagaaaaatagccatgttgagcttcttgttactgtacatgccaagcataaaggccagcatgatcattgccatacctgctcccatatacaacgccatatagatacgcgtttcactaaaccatatatgtgatactgcgtaagtgttgagatacatcatgacaaacatagcaatggttgaggtgatgatcattgcagcaaatcttgagtatttcataagtaatccttacattgatagtgtaaatatttcccactgttagcctattattctctacatgtggtcatgttctcgaaaaattgcaagtaatgagccagtatcaataagagtatttgtaatacgattgactcaatttcagcgcaagtattgtgaatcagtactaatctacacatttcggtgtaagagtttatgggcaaaaaatcttctttgaaggagatcaaatcagcttatatttagagtttgagttttgaacttgtgatagacacaggcggaattggctttagttaacaatctaatgtgggaactcaaagtactacaagctgagcttcaacaaatgtaagctcgtgtacaagtgaagacacagttaaagcatgtggaagaattaatcttgatagttagagttgtcatttatttcactttttaaatgaacgaatattgatcttttatctcgttcatgttcgaaagctaaaagtttcctacacatgaaagtggttttgcaagagtatctactagagaacaagatttgaatgctcaactgttcagttgggctattatggttgtaaaaaaatattataaggcaatgtgtctggtacttcggttagaaatgaaaaaagttaaagaagctaatcgatttcatcaggtagggtgatgaggtaatagttactcgccttgatcggctaggccgatcattaaagtctattcttgaggacattgaaagtactcacaaacggggcgattgttcaaagattattaatggttctgtcagtacaaaaaatgataatccgtttaccagtttcattcataatctgcgcaattagcaataatgacgtgcgttcataacggtcataaagagcaatccccctgcgctgaaataatgcttattccttcattggatataagcgaacagcttaagttaaatgaaattactcaaattaccttattaaacttgtcacagggagagcatgagtttcattgtcagatacaaatgtatcgcggcgtcttaaaagtaatttagttttaaataggtctttttacacacctgaacgagcaaaagtaacttaacaaaaggcttctcgaaaacattacgagaagcctctaaattaaagttaagatttgtatttactgtaaacaattctatatagaacaggcaaaacaactaaagtaagtaaagtagaggaaataatccctccaattaccaccgttgctaatggcctctgaacttcagccccagttccgacgtttaatgccataggaatgaaacctaagctagcaaccaaagcggtcattaatacagggcgaagcctgatagttgcaccttcgataattgagtttattagctctcctgtttcaagtaatcgctgtttaatgaatgacagcatcaccagtccatttaatacagctatccctgaaagagcgataaatccaacagcagcagaaattgaaagaggcatgtctcttaaccacaaagccaatacgccgcctgtaagtgctaaaggcacaccactaaatatgatcagggcatcttttattgaactaaatgctatgacaagcagtgtcaaaattacaaacaatgtggcaggtactacgatggataatctttgcgttgcactctcaagttgctcaaatgttccgccgtactcaagccaataaccagcaggcaattcaacattttgttgaattttttgctgtgcctcttgtacgaatgagcctagatctcggtttctaacatttgctgtaattacaattcgtcgcttaccattttctcggcttatttgacttggaactgtcgtataatttaactctgcaacttcgcttacaggtacaaactcaccactttctgtcgcgattggcaaattacctagctgatcaaggttggctctcaacagctcaggatatctaactacaatttcaaatcgacgatcaccttcgaatattaaccctgcgccttcacctgacacgactgtttttaaccaagactgtaagtcgcttgcatccaacccgtatagcgctaatgcttcaggcttggggttaacggtaaagataggcacgtcatcaacttgttcgagccgcgcatcagcaacacctgaaattgtattgagtgtagccaaaacttcttgtgcagaaatgacaagttgggatagatcatcaccgtagagcttaatccctaaatcagctcttactccgctaattaattcgttaaatcgcatctgaattggttgagtaaactcataattattgccgggaatagagctgagatctttttccagcctttcaacaaaatcctctttcgttaaattagggtcgggccattgctctctcggctttaatatcagaaaagtatcagtcacatttggcggcatcgcgtctgtcgcaacttctgctgtgcccgtttttgaaaacaccgtaacaacttcatcatatttcataatttgttgttcaagtaccttctgcatttctacagcttggtcaatacccgtgcccggaatacgcatcgcgtgcagtgcaatgtcaccttcattaagttgaggaacaaattcagatcctaatttactaccaagtaatatgctaaatgtcacaagtaaagcagcgccgcaaacaactagccaacgtagttttaaagcccacttcaaaacaggactataaactgacttagcgccgacaattactggactttctttttcgctgattttgcctttcaagaataaagcaaccgcagcggggactagcgtgaaggtaaataccattgcagacaatagagcgattatcaccgttgcggccatcggatgaaacattttgccctcgacacccgataaggtaaacaaaggtaaatagacaatcgttatgatcaatacgccaaaaacactaggtcgtataacctcattggtagcagaataaacaatgtctaggcgttctttcagggaaatgacagaactatttcgtttttggctttctgctaaccgcctaatgcagttctcaacgattattaccgcgccatcgacaatcaatccaaaatctaaggctcccagactcattaaattcgcagagactttgctttgaaccatgcccgtgattgttgccaacattgccaaaggaattactgcggcggtaatcaaagcggcgcgtatgttacccagtaataggaacaatacgaagataaccagtaatgcaccttcaataagatttttctgtacggtgctaattgctttatcaaccagagttgtcctgtcatataagggaactatggacacgccttgaggtaaactgttttggatttcactaagcttgtcaccaacagccaatgccaccgagcgtgaattttctcctaccagcatcattgcggtgccaatcacactttccttgccttccagtgatgcagctcctgtccttagctcttttcctatcgcaacttcggcgacatctttaacttttacaagtgtgccgtcgtcgctttttataatgacgttttggatgtcttgaatagattgcaactgagcttgtgaacgaacaagaatttgctgtccgcttctttcgatgaatccagccccttgatttgcattatttcgcattattgcatttgatagtgcttcactggtaataccgaagtgcaacatccttaacggatcgggattgatatggtattgctttttatagccaccaattgcattgatttccgtaatccctttaaccaatgcaagttgtggtttcactacccagtcatggatctcccttaacgccatcgcatcatagggtaagccattattctgctttgcactttcgtcggcagttatactgtacatgtatatttcaccgaggcccgtagcaattggtcccatttctggttcaatgccaaacggtagttgctccttaattgcgctaagtcgctcattgattaggtttctggcaaaatacaaatctgtgccttcttcaaacacaacagtcacttgcgacaggccatatcgagaaagtgaacgggtataatccagcttaggtaaacccgccaagcccgtttcgacgataaacgtaatccgttgctctgtttccaaaggtgaataaccttgagcctgcgtgtttatttgtacctgtacattggttatatctggcacagcgtcaataggtagcttctgatagttccatattcctaaagcgatgataaacaaggccataagcaacatagtaccacgtctacggatagataattctagtatccaagcgatcatattttcacctcgataatactgaagccaatatgtagaggacaaaaaggtcggagattagtgttcatgtccagcctccgatttttttagatcagcaactagcagataactgttctttacaaccacactttcgccgacgttcaaaccgtcgatgatagcaatattgatagcgtctgaagcgccagtttttacggcgctagggtggtattcattgccttctttaataaaaacaacatctttgccttcaaactcttgaatggctccttttggcacaacaactggagcagagtgttgactggtcgtaaccgcacctttaattacagtgccaagcggccacttgttggttttgttatccaattttacaaatgccaatgagtatggcttgtcgtttagtgatggtgttaaatagctaatttgcgcactttgattaaattcagtgctatgaattagcacctgctggttagcgttaaccttacttagctgagtaggaaacactgatagttgtgcccaaaccacgtcaaaattggctattgtcagcaagttttcaccatttgtaagctcgccaatattggcttgcctagcgactatacgcccagacattggtgcttttatcgaatattgatttaagctctcattggattcaatcactaccaacgtttcaccttttttgacctcttcgccgagattgacttttacttccttaataacaccatcgaatctagcgttaacgtgcgcaagtgaggcaggatcggcaacgatttttccatatacaacttcttcgttatgaataacaccgctagttgctgctactgtttcaatgctgttttgtttagccatctcaacagacatagagactatttcatctttgtgttcttcactggctgaggtcgtgatggaggtgaaaccaattacagcaacaagcattaatttgaaaaggctgattggtgaatttaatatatttttctttttcatgattaattctcaataaagcttgaaagttggctttctgtattgccggaagaaattaatggaatgcctgataaggactcaatggaggcgctttgtttgtgaacctcacttgcggcaaaaataagcgcatattgcatctcaataagctctttttgaactgaaactagctctaaataactaaagcgcccgtccgaataggctttttgcactaatgacaaagcactttcttgaggcggaataatactggtttgtaaggtttcaaccgtaaggcgagcctcttcctgagccgcataaaatgtcgctaattggctgtaaattgctcgctcactggctttccgttgctgctcaacttcatcgagttttgctttttgagattgatagctgcctctatttctatcactcgtaaacagagggacgctaattcctgcaaccaacgcagtctcattgctaccttcaagtcttttcacacctgcgctccacgttatattagcgtggctttgtgcgttgattgattgtaattgagcttgctgaattctcgattgctctgcataagctaatatatgagggctttgagaaagttgagccatgatgtattcgagtgatattgttttgggaagtgcaaataaatcgcctgatacacgagagaattgcggtgattgttctccccacataatagctaacttacgaacactggcctctaactgcttggaaatggttagcgtctttagtcgagctgttgctaaagctgcatcagctcgtttttgctctgatgacggtgccgaaccaacacgaacttttttggagacagtttgataggtttctcgtgctagcttttctgcattttcattgacgagcatgatttgctgtaacgtcaaaacatcgatatagcgagctgctacttcacccaaaatatcgagtgtttgtattcttttttcaacagctattgcttgctgttgggcattaacataaagctttctgctatttaccttatctcccaattccaccacggaagatattgataaggtaagttcagcgtcgctgaatccagatacatcacctgtacctgcaaagttttccaattcagcgctgacgttatattcaggttttaaccctgcggtagctaactcgccgtctaaacgcttttgtttgtatttaaaagctgttagctgtgggttgtttgcaagtgttcgttgtattgcctctgacaatgaaactgaatcaacagttaagtcatttgcaaatacattattagttgtcactaaaaacgacaacagaagcaaccgttttactttcttccaagcaagtacgggggccttaaaataagacatattcatattttgtcctgtttattttatgaaacgagcgttggcttcaccgcctaacgcgccaattaaataaaaggactaacttttgggaggtcgaagtaatctggaagggggagcttcaatgactatttttaaataatcaaatacctgacttgatttgaaatcaatgtctctactgatgtaaacatgcgtagcaaactgtacatgcgagccattgcagtgtccgcaatgatgacaatcagcggggttgtgttggtcattatctgctgatgattgtattaatttttcagaagaaatgtggtcatctaaagcatgaacatgctcggtttttatatgctcggaatcaacaatatgaacatcagcaacttttgccacagcagaaaatgactgaagtaatatcagcactatcatgatgtatgcagggaattgtttaatattcatttcgtttcaactatctcttagttatgccaatgttaacactatcgtttagcttgcgtcacgacattgctcgtctatgaactctatttcaattgttgtatgagcaaaatcaaactctttaagctcctgtcgcaactctagcttgtacgatttcagctcttcgttagatatttcagtgtttaaaacaatatgggcggttaaaacgttgtgttcaccatcaagtgaccagatgtgtaagtgatgtacttcacccacaatggctttagaaactattttcgatttaatattttcaataagatcaatatctggtgtcgcttgcaagaagagcataagtgtcgttttcagtgttcttacaacattaaataaaataaaaagagtaaacccaattgataaaataggatcgagtatgggccattcaacaaacatcaatacgattgatacaataaatatagctatccaacctaaaacgtcttcaagcaagtgccagtttaaaactcgttcatttaaggtctttccatgacttagcttataggcagcgtaaccgtttaccaccatgccaaaaatagctaataaaagcattccttcgacttgaggcatttcggggttagctaatctgggtatagcctcaattagtataaaaacagaaccaacagttaataccaaaccgttaatcaatgcgccaagcaatgaaaagcgcttgtaaccatatgaaaactggctagaggcaggcttgttactgagcttatttaatccccatgcggtgcctatggagatgctatctcctaaatcatggatagcatctgccatgattgccgtactattggttaaccaacctccgataaattcgatgatggtaaacgtgaggtttagaaaaaaagcccagccaatgcgtctcgaagcgtcctcatcattgtgagagtgatcatgaccgtgagagtggctatgcatgttgagcctcggcggttacattttttcctctaagcctttgtacattccaattaatgatatgacggataaagttttggtacgcccaacgtttaatacccgttagattggttccctgctcagcatagaattcatcgggtgagtcataaaagccaaagtcgtcgtgtatgccttctttttgaatataagtatctttaccaacccagttcgtctctgggttacttatgcaggtagtagctattccataaccacaaaaattatctttagcttgactgaatttggattgaattgaacttaggtaagcttcgtcgagaatgaagccttctaaattgatccacttaccttcatagagcacttctacccagctatggataatggattttggggcaagccaaaatacataagaaggaatagcgcctttctgaagctgttggtcaatcgtgaaaccatgaaatcggcactgaataccaagcgctcgtaatagagccattaacaagtttcccttggtattgcactgtccatagccatccgctaaaacttcactcgcagatatatcatcgctgcggttgtaaccaaactgaatctcatctttaacaaaggtgtaagcagctcctattgtgttgtattcatccaatgtattccaattccgatctgctattagagattggatgctgtgatcatctaagtctaatatttgtgttttctctaaataattagcactcattatccatctcctttaagaacatgactttgatttacttccactacagctattgttttcgcttgttaactctgcgttgctcagctctttcttcgcatcagtaataatcaggtaagcccctcttaaaattagggttgcaatcacactaccaatcacaatgtcaggccagcgagaatcaagtagcatcactaaaacaccagcagcaatgacccccaagtttgcgatcacatcgttggctgaaaatatccagcttgcacgcatatggacttcaccattgctttgcattctgattaaaactaaacaaatgacgtttgctattaatgctacaaaaccaaagccgatcatgaaccaagagtgaggctcaccttctccgagtcttcttactatgtcaaagattaccagtattccgagtgtcagctgaaagtaaccgctgataagggctgcattggctttatgctttaaagatcggctcacggcatatagagcaataccatagacaattgcgtcagccagcatatccattgaatctgctatcaaagccgttgagtttgcatataggcccacagtaatctcaacgcagaacataaccgcattaatacctagcaaccaatacagcacatgtttttgtttcgcatcttttagttcgacttcgcaaccacaaccactcattgcacggccttagttatttgcttgataacttaactataaagtctatagtgactatagagtcaagattcaggactaaagttttatgaagataggtgaactttcaaaaacgacagggtgttcgatacaaacaattcggtattacgagaaagaagggttgctttcaactcctgaacgtactgaagggaattacaggttatacggtgaacgggctttaaaagacttagagtttataaagcattgccgaagtttggatatccctctaacagatgttaaacgccttatggaactgaaaaataagccagaagaaagctgtgcaagtgttaataagctcattgctcaacaattggccttagttaacaatcgaatgagagaactcaaaacactaaaagctgagcttcaacaaatggcaagtttgtgtacaactgaaaacaccgttgaagcgtgtggaataattaagtcacttgatagttagaattgtcattcattttctatccgtgttatgtacgaataactatattttattacgttcatgtacgaaatttatttaatatactttcgttcacttaattgttaagatgtacgaaagttacaggtttcgtacatatgaaagttggttttgcacgagtttcgactcaagaacaagatttacaagttcaactgtccaagttgggcgctcatggctgtgagaaagtatttcaagggaagcaaagtggtgcttcgattaaaaatgatgagaagttaaaagatctcataaattttatacgagaaggcgatgaagtaattgttactcgccttgatcggcttggccgatcattaaagactattctcgaagcaattgaaagtattcataaaaagggagcgtgtttaaatatcatcgacggctctctcaatactaaaaatgataatccattctcgacggcgatgatcaacctttgcggagtcttcgctcagcttgagcgggatttaataaaagccagaacagcagaaggtcgtgaagaggctaaggctaaaggcaaacatatggggagaatgcctgctttgtctgataaacaagcgaaggaattatataaagataaattaaatggtgaatcgatttctgcattagcaaaaaaatattctgttagccgccctacggttcacagaactattaaaagaatggaaaagcaaaataataaataaagggagatgttatgtggtctgacaaagaatcaaaaattgatttcttaaattttaatgaagcggctgagtcgattaaagatcttataacagaaaaggaattaatgcctattagcgtcggcgtctttggtgattggggcgcaggaaaatctactattcttgaacttaccaaagcatctttggaaactgatgaacaagaatatatccaagtacattttgatgcatggactttccaagggtacgatgatgctaaagctgcgctattagaaacaatcgcatctactttagttaaaaaagcagcagacgataaaaacctaagtgcaaaagcaaaagagtttgctggacgaatagataagatcagactgatgggactacttatggatggtggagcagcattagctggtataccaactataggtggtatacagaagatcatgggactattcagtggtggtgacgatggtgaactggatgttgatgatgtaaaaggtgctgtcgatggcgctaaggatgtcgcgaagaaaaacaaaggtttgatcaaagataagaaatcattctcacctcctaaagaaattaaagaattccgaaaagcatattcagatctgctaaaggagtttgataaaccacttattgtctatgtcgataatttagatcgctgctctccatttaatgccatttcaacacttgaggcgatcagattatttctatttctaccaaataccgcatttgttattgccgccgatgaagacatgatccgcttggctgtgccggaatatcacaaaggtgcatctcaacgacatcaaactgattatttagacaagcttattcaaattcctgtgcatgtaccaagacccggcgttctggagataagggtatatttaatgatgcttactgctcaagaccacggcgttaccgatgctcaattagaaacgataagatgtgcccttgaagaatcattaaggctgtcgtggaaacaaccacaaataaccattgatgagctacttcaagatcacgctatcgaaaagcattcagaactcagaagtaaatttgtagttgctgagcagttagctccactattagctgaatctacaaacattaacggcaaccctcgcatagttaagcgattactgaaccaagtgaagatgagaaagaaaacggctcaccgtcgaggtatgcagcttgatgaaaaaaccatcactaagctggtaatttttgagaggtgcttaggcactcaggctaccaataagctttatgaattaattgacaaggaaaaggggttcccaaaagtattggcggaactcgaaaattcagaagttgaatttgacgaaattaagttacctgaagagtggaagctagacctagcttttattgacaaatggtcaaaattacctccaatgtttactgagatggatttgactccagcggcgtatctgagtcgagaaagcattccaatgggcgctgttaatgcggtaatgtcaggagccgctcaaaaacttgtagaagacttaatgaagcaaaaggtaagggtcagtggcgttaactctactgcgattaccacaactcctaaggaagaatacatgtcagtcatggatggtttgattgaaaactttaagttgattggtgattggactgaaagacctacaggcatttatggagcggtgctacttgccaagcgggatgataaatgttgcttaagtcttcttacattcttaaaaagcttgccccgacaaaggtggcttaatccaattttaaaagaactagagggaactaagtaatatgggtacgtccgcatcgtcaacaggaccgaataacaagagtccgctaattccatcgtgggcagagcaaggagaccccgtcacgatagaacctgcatcaggtactgatggggatgatcaaacaggctttgacagtggtcaagcagatgatcagaatgacaatagtaacgatattgacaatgacaaggttcaacaagaaatcggcggttcaccaacagcaacaccgcctccaaataggtttgctagtgcaagaagagcatacggtaagtacgctcaaacaggtggatcaacttcggatctaaggcgttcattaaaaagttactctagaaaaggctctggtggaggtaagagtactagccggagactagcaagcggcataactgctggttctggattgcttggtgtcatgcgtggcgacacagtaacggttaataatcaaagcttatcattaggtgatctaactgggctatcgactgaccaagcaattgacaaaattgctagccatttagcgcctcataatgccgattcagatgctgtaagagttgcgttggattacgcactagaagaagcattacccgatactgaagagtttgatcctaacagttttaccgacgaagttatccaagaagccataggctgttatttaacagatcttatatttcaagatgttgtagaaggaatgggcagagcttggtttcacgttgagcctgcaagcaagcatcatcaaatggaagttgaattaagggaattaataaaagtgatcacacaagagcagttagacaaagtaactaatggcaaccccagttctattagcaaggaaaatattactaaaattcaagccgatgcaattgcaatgacagtggatgagtgggagagctttgatgactaatttttattttaatcatgacccagctaacttgcctgatttttctaatgattgtcatcctgtccagatgttccatacgcatcaaaatgacatcactaagcacagcttagtgtcaaaacaactactacaaacagttcgtgatttgggattgaatgtagatgctgatgcaatagatctgataacaattgcaaccgctgttaccgccgctgatacatttgaattgagggataatgcagaaaatgcatgggctagaaaaatgcatttacatgttcctgttaccgatgaggatatgtggaatactgttgagcctgaactaagttctttgctcaactttctaacgggcgatcaatggcagtttacttttgaaaaaacaactatgccgatgccgactcctaaaacaagtgagcaagcgaaagcaaaagcaaaatcattaattggactcaactcagtctgccttttttcaggaggtcttgatagcgcagttggtgcaattgacattttaaacggagagtcagccttaaaaccgcttttggttagtcacgcttatcgtggtgatggcgcaaaacaggaagatattaagcatttattgtccccgccattcggcgaattgtcctattcaatgtctcctcatattatcaagcagttagaaggtaaaactgacattagcatgaggggaagaagcttcaacttcctagctatggcggtatttggtatatcagccttaagaaatgctaattgcgatagcagtattgaaactattgtcgtccctgagaatggctatatttctataaatccaccgcttaccagaagacggattggtagccatagtactagaactactcatcctaattttctaagcaggcttgaatctttgcttagagacactgggtttcatgtcaaatttgtaaacccctatcaattcaaaactaaaggtgaaatgttagcggaatgtgttgatcaagacgcaattagaaaagcagttcctctgagtgtttcttgtagtcattggcacagagagcataaacagtgtgggcattgtgtaccttgccttattcgaagagcgtcagtttttcatgctggttttacacaagatgcgccatacaagacaaagcggttgagaggtcttattaaagaaaaagatactcgcgatgatctccaagcggttcaaactgccattattagattgaaacaatcagataactatcgttcttggcttcgaaagtcaggaccaataccacaagaaaaagatatacgagaaaaattagaatcaactattaagcgaggattggcagaggttgaattatttctccaagcggataaatcatcatgatggatcttcattgccatgttgatttatatccagattatcaagaggtattgaacgacataaaaagcagtaattattacgtgctatcagtaactacggtgccgtcagcttttgaaggtactgtccagttaacaagtgacataaaacactgtaaaacggctttgggtctgcaccctcaacttgctcatttaaggaaaaatgaactacctctattcgataagctagttgatagaactagatatattggagaaattgggctggatggctcaaaaggttatgctgattactttgatgatcaattagaggtttttacgcatattttgaaaaaatgtgaaggctttgataacaaaatattaactatccatagtcttaatgcgacaggtgaagtacttgaacaacttaagttataccccgatgctggtacttctattcttcattggtttttaggtactaagaagcaagttctagaagccgtcgagctaggctgtttcttttctattgggccagccatgcttacttcagccagagctaaaaaagtaatatcgtggatacctcaagataggattttactcgaaactgatggccctttcgccaaagtggcggggaatattctgtttccttcaagtgttggcactgttactgaatatctggctgaaatttggtgtaaaaataaggcttcgataattgagcaactgtcagcaaaccttaggtgtttaacatcagtcaagtaactaattatacgtcacgtaatcttataacaattttattcaggtttaatcgatttgtttgaagtatttgtattagctatagcactcagtatggacgtgtttgcagtatccataggcttaggttctaaaaaagtagcaaatgctgaaaaactctttattaaagccgttgcttattttggatttttccaaggctttatacctcttttaggctattacagcggtaaaggatgatcatcttggattgaagattatgcaccttggatagcttttattttgctattatttatcggtggcaaaaatgatttatgagtcccaatctgaaggaattgaagaagatattgctaatgttactcatcgtgtgctatttgttcttgctattgccgccagtattgatgcaatggcggcaggttatgcaatcacattgcttgaggtagacatagccgtagcttgcttgataataggcgtcacgacgtttgcctttagctagattggtgtgaatatcggcgaaagaagtggcgtatggctggagtctaaagctgaactatttggtggtttagtgttaatcgcaatcgcatttaagatattacttggttgacacagaaccaccgaatactaggctacttacctgagcaacatgcattgccttcttgaataggaggacacttaactgttccataagagcaataaacgcaacaatcaccttttaacggtttaagtagtgctttacagctttcgcattcgtaataccattggcaagcgtttgtaggcatggtttcaactttgctaaatccacattcagggcaagtgattttagattctagttctataccttgcatactggttccttaatgggcttaacaatatctaaaatagacattacgaccatccaaatgatcccaaagtaaaataagtaagtgctccagtcgtattgccataaaggataaagggtcagcaatactgcaattgggccaatgacacttaaaacgcctctcaatgaatctcgatgttgataccaattatagaaattaactaacaacgctagtgaagcaaataatggcaataaggtgttcaccgctatcccttcaaaatgtgaaagaaaacctaacccaagagcagatgccaatgagccgagtgcaggaaaacatgctgtgcagctaagggcggctagccaaacgccaccagaacctactttatctagaattttattgatcataactatctacctcaatttttaaggtagtataaactccgtacataagtacggggtcaatagctatttaagtgaatttattaccgggcaggattgagggtcttgattggccttgcaagaatctgtcatatcttgaattactttctctaatcgctgtaaatcagcaattttattacgaatgagattaagtttttgcaaccccatcgactcaatatcagcgcaactgtcacttagtgacataagcgattcaatttctttcagcgtaaaccctaatgctttagctttcagaataaatttgagttgactggtaagggcatcgccatacattctgtaaccagactctggttttaaaggttgctctatcagaccttggcgctcatagaaacggattgtttcaacattgatatctaaatcttttgccagttttccaatggttctcataaacatactctttagaagcagaaatatcattatacaattaatgcggattgcctaaactcaattttattgcatgaacggggtcgctaagcgtcctctttgtagaattaagttcacatatccagatcactctgaccgtctcttgttcgctcttgctgcctgtcaggtgaagtctaagcctaatcaacaaaactgtaagttgagatatgagctactacatctaatctattgtttcgttgaaactaattcaataatttcaccagtagacgtatccactcttatttctgtatgttgccctgaatgctgaagttgattttgtaaatcggcattaatcagtttgagcttatctatttctgcgtacatttcactcaacaacactaataactttgtatctttattatcgatttccttagtgccgatattatttttttgcttttctttagcaagcttgctttttagttcggctacctttgttctgagttgttttattaaattatctttatttttttcttcccaagttaattgagctttttcaatactttctcgtaactttacccatttttcttcttctttagatagattcgcaatatttcttttagctctcgttgctactgcatttttggttatcttgctgccatcagatttcatctcttcaaaagcacgttttatatcatcatatgcgctactcatgcttgttctccttggtttgtatgcgctttgccttcatctaatacatagtcagctgctgctatattatttttccagtgaatagcaaatagctcgtaatcttcttgctcttctgtggttgatgctgcatatgcctctagtttctgggtcgcatctttttttatcacttgccaattgaccttgtggcgtttggtaatgattttactaccacaatacacacagccactagggattcctgctccttttatcttgcaagcttctcccgcagtgcagtaccccgtaggcaagccacgtatgtttttaatatttttgacgagaaattttttcagttcttcaattgaactgaaatggatctgcttaatcacagtcgaatctttactttgactatcagtaatacctattatcagatctttagatgttttattaatttgctcaccagcaccacctttaagtgattgtgactcggcttcatctattaactcttctgcaacacggtcaattaaaatctcattaaactcttcagtagttttaattaaagttgttgaggccaaaaatgctcttcgagtataaacaaacgtcattaggctggttaaatgtttaaattgatatctaatatcatcaagctcacctaatttattggcaatgacaaagtaggccaacgtatgtcgaaacatgtgagcggttaatctaaacgtatcgccttcttcgtatgggacacctctattctctcctctaacttctttgtagttagattcaaggcgttcaagctctgctatatcatcatcgtctagagttaagtcaaaaagctcaatgttttcactgtttttaacctcaaattttgtgaatcgcccagcatcgctaaaactaacactacagctactatgtgaaaccccgaaaagacggtttctttctaacccttctttcaagttgtgtgcttgactacttgttatattggctctgcatgaagaaagtacagcttttgccctttcttgcataccgaacacatatttttcgtaaacaccaacacactcatgtacttcagcgtttgaaaaccattccatctcaaccttactgttgtcggttttggtcatgattgccgtaatgtaataaatatcatctttgtaattggcacagccaaccttgcatgtaagtacttcgttatatctcatgcctgtataggccaagatattaatgtatgtggctaattttaaatcttctaattcttcggataattgaatgaattcctcttcattgggtaagtttcttacatgttttgctattagctcacctgtactaattttgggcggtggttcaacggagccttcatttaaactatctattaagcgtgcatttaattctagccatcgttctatcttatccttagagttttcaactattttttctgcaaacttcagaatttttttcattactttagtaggaatgacagggtgcgaataagtgactggtctcggatggtgtaactcgtttagttggttaagcacatcaataaaaacactacacaccttagggccaaaaagacgaaagcttcgttgcacgtcaaatagtttagtaaatgagtgtgattgtctgtaaatagctattttcccgacttcatataaatagtcttttatgagattcctaataactaagtcagatttgaactccaactcatgaaatgagtgataacctctttgtcttaagaaggctgcaattaaatttagatacgttacatcattttgaagtgtagagatttttagaggtttaccgcctacaacatcaccatgtgtgagtttaattagtgaataaattcgaatttgatatgctaattcatcaacacctttaaaattcacatttctttgcgtttcttcatagcttatccaagtgtcatcgccaaagtgaatagtgccatgtttagcaatattcaatgctctgttttcccacaaagcaatcgaattaaaagcgctagtatcatcaactttaaaatcttctaacacctgaaccaaaggttttatagtgatttgacctgtatgtgtttttacaacagcgatatcaagtagttttgttttagttatctctttggtcatagcaaacctgtgtttttccaatgaggatgaataccctctgttctcaataattcttttccatcaatcacagcttgagcattaagcttggcaatatcagttaatatttcgttaactctatttttcaactgctctatgttttccagttgctctgttacagagtcaaatgttgcggctgagttttccatatcagcaacaacaaaatcccggtatgacaaaagtttccaaacatgcaatgcgtcagcaacacagcgatagaacggacaccacaagcatgcgttaaagtcggcacatgcatgctcgtttgtatctcgctggtctaataatttcctgttttgagattcgaatgccactactgcggatttatcttttgagttaatgcatgtgccattcgggacttttttaccgtcttctggtggagtctgcaaaatgattactttgtcggtaacatcgcgaacaaaatagtctgccattgtttttgtcgctctgttgattgtcattgcaacatctttgttatcttgcattaaataatgacgcaagaacgtttcataagagtgcttgccagctttttgataccacttaaattctttggcaacttttcggtaaatgtagttaagccctgattttctgatcttttgcgaattaaatacgatatcacacccaagctcagtcaatatcctatctatagtggtcttgaaacgtgatgctgttaataattgaatctttacttctccaatactatttactttgggaaaaacaaaaattctttttgataggttctcaatagaagggcggtaaatagacgtaagtctagtcgcagccttaatatcaaatattactggttcgacaacgtcgccgtataagacgccttctttttctagatcttcggctttaatttcaaatttatgccattgagtttgataattagctcggcgtttaaataaacgaagagcaggagttttacttgaatgtaatggcgtgttaaagaaaaataagtcgtcagtatcaagctctagcgtaggagttgaattccaaccagttttcaatatgacttttgctgcataaagtgtaactttgtctttaattgtgagtaaggtctcagaaagccctttttctatgtaatatgctaattctactacttctctatatgagtagagtttatcttgattctgagatagttgctcttgatgttgtgcagttaattcggtgttgaccggaaagcttttaatagtatctagaccataaaacgatagtaatttgtcgatagcgctctgatattgattaccaacaaaaaccgacaaatcgccttgttttgattttagttgaattgcctctcttatagcctttagtatctcacagttattttcaacaaaagcatgaaccccatgactggcaataagcttcatttgttcatctgttaatgatgatgcattttctttcaatgctctagccatactacctatgtaacctttgagagtgacgatacctatgctctcgccatcaattcgctttgtaaaaactttatggtattcgactaggttttgataaaatttataggcattgtcatatacccactcatgcttctgccattcggtagtgtcactttctttaaggtaatagcccaatgagtagggtaataaactttcctttgcgattttttcacccgtaacaaagtggtaaaggtccaatgcagcgtttagtagcagtaaaaactgctggttattttgagtttcttcttggtaatgcttataaaggtatttaaatccctgaaggccattttctgcaaacccttgaattccacgctcactaagcagcttaattattggtgatgctacgctaccagcactattcaaccaccttggaaatgataaagttgaggatctaactcttgttgtattagcttccgaagcgcttgctatctgatttttcaaaaaagcatcaacttcattgccaaatttggatgatatgctttgtgcataccctattacttcggcttcagttttaaattgattgactctagctttaccccacacatcgggtagtataaattttaaaaaagtacggaagttgtgattgcatataaatgatgaaacgaattccctatcctgtaatgttgccaataatggcagtttgacgcgttcagtattcttaaaagtatcatgtagacaaagatttataatagctgtcgcagttttgaggatatgaactggtttaattgagcaggacactttaataatggacaatgatctaatattgaggtgttaaatgacaaaacgaaaaaacaaaacttatacaaccgaatttaagcaagaagcagttgctttagtcactgagcaaggttattcagtttcagaggccgcagcctctttagggatcaccaccaaacttatttataactggaaagctaaactcgaagagcaacaagctggtcattcgctaaatgaagatgagcgcgcagagttaaagcgcctaagaaaagaaaacaaagatctcaaaatggagaaagagatcttaaaaaaggccagcgccttctttgcgagagaaatgaagtaaagtatcagttcatcaaagaaaatagccaagcttttcgcgttataaaattatgctcagcgatgaaggtgagtcgctcaagctattacgcatggctggcgcgtccagcaaagcttataacggccaaagagctgcatctttatcgcagagccaaagcgctgtttaagcgcagcagagaaagcttaggctaccgtgagctatgtaagaacttacgcaaagaaggttttaaaatgacacgctataaaaccagaaagttaatggcgcagctcaatttagtggttaaacaacgagtagcttataaagtaacaactaagcgtaagcactctgatgcagttgcagataatttgcttaaccagaactttaatccggtagcacccaatcaggtttgggctggcgacgtgacatacctgaaaactggcgaaggctggatgtaccttgctgttgtaatggatctatattctcgtcgaattgttggctggcatattgataaacgtatgacgactgatttagtaatgaaagccatgattaaggcttataacctgagaaaaccagccaaaggcttggtatttcattctgatagagggtcccagtatacgagtaagcgatatcgcaacttgctaaagctgtttggtatgcgagcaagcatgggtgatgtgggggcttgttgggataatgctgttgttgaaaggttctttggtagcttgaaacatgattggttgttaaaagtggctcagccaactcgtgaacatatgaaaagtgatgttactgaatatatgaaatattacaatctggaaaggctgcactcagctaataacgatcagtcaccagtagagtatgaaaattctttaagagaagtgtccggctggagttgaccagaacaatattgtccccaatagaagaatctttgaggcttaattctggaaggacgagatagtccagatatttatttagtaatttacgaatctcttttacttgatggaattcaagttcgaataatttagttatgtcgattgaagtagccccatttactagcctaaaaggagcgttgatagcgttatcataaaaatgaaacttagctaagttttctaaggcttcttctatacgagtagcataactaggtagcttgacatcatttatttcattaatgcaaaagtattccagttcttgccaaatttcaaagtctgatagagcatttaatcccgaagtttgaattgatgtcgcagtatctgtactaaccttattaagggctagaggaagagtgtgttgtaaactgacacaagcattccgcaagcgactcattgaaatagcagtgtcgtcatctgcgctaatattgttttctttgtcatatgccctgttaaataaaacgtctaactgtttggctagaacaattgaatgaggtttaaatctagcaggaatacgattggacttccgcgttttaacttgctgctgcatcttcagcctcacgcatcagtaattcgtcaacatcaccgtagatatctttcacccactctgacattgctccgtatgcatccactgctacacttttggcaaagtcgatgtaacgtttggttgttttaaaactttcgtgactcatcaaggtcattagtgtctgtctgatggaactctccgattcacctttgtcaattaggtatttagcgacataagtagcaaaggtagcgcgtaagtcatggaatgtgcgtaatagtatttctaatccctgcttcctttgttcttttctaactatggaaatagtattccccggtgtatcttcgcttatccgcgatcctgaactattcataaacaaaggaagcggatgttcactattgtccataccatgattagtctcatgtttggtacgtcgcttcatattttgaattgtcaaagtgtgattgtacaaaagcttcattagaactcgcgctattgttaatctcactggcttatgtccttttcgtacaatgttcaattttggaatacgtttctcgttttctttttcatcaggatcaaaaaggtctttctggtcgatggctgaaatctcaaaagaacgaagtccacctagcaaagcacattgcaaataaagcttataagtctctttttgagccgtatccgtctccagcaactgtttaagttcttttggagaatatggttgtagatctttttcgggtgagtcttccttttgtttcaatgtatttggaatgctcaaattactaacccacttccataagcctccagaacgtgtgttgctagtaggtaattgaaacaatgaacttacacttgatttagctttcgatttaatacgtacctgtttgtattcaagtgagaaggggaggctatctatagccccgcgcttatggctccatatatagaatgctttaacagctctaattcgttcttgagcgctgttaaagcttatgcgtttagacttatctttggtttcgactctttcacataaatgtttgtgatatctccacacaggtaacctagaaatatcatcatctacagattgttttgaaagtggtgcagttattacttcaaaataggatgcatcatctttatccaaccaatctaagaaagcttttaagtgcttagctatactgcaaacagacttaacatctaatggctttcccggttggctggcatgataagcgtcactaaaagcctcattgtctatttgattctttttgagactgaaatgaccttcaaagcggtgcattaaaaataagttcatttcttggcattcggtgaagcgagtcgggtgatatagcactggaaaattaggttctattttatcgtgcctatatgagtgagttctgatgcctttttcagtcttaataggttgccctgatttatcgaggtgaaaagacattccttttccaaagttgactgatgctttaattattttagtttttgttgtatttcgaagtatcattttcgttcacctttgattcttagctagagtatgtgtgtaaaaacttttttgttcaagtttattaagggtatgatagtattatatcaattcgggggtgattttggatgagagtcaaaacttaacggcatcacagcttaaaaccattattacccgctgcggtgaaggcacgaaactaatttgctcaggtaacttggcgcaaatagatagcaactacttaacccccgtaacttcagggcttacctatattgttgaacgctttaaagattttgaaggcagcgccactgttaacttaaatggtgtcgtacgcagccgtttagccagcttcgctgaagaaaatttataacttgctagtacttctatgcctcgttaacctaaccgttaacgaggtaaggtacttataaccagtgaattttttaccattaaagcattattatcgctctttatcagtggcacttattgtgccactgctggtggcgttttttttgtgtttgcatctttataatttaaagctcgaacgtgctattgaaagcaggcaaaacggttttaataatatctctgcacagcttagccatgcaatgaatgctgccaatggcttaatagatactatgttcaagctctacgagcagccactttcttatgattatgcgcctagcttggcgcgcaatgttaatcagtttgaccattattattaccaattggtaggtgaggggatcggagaagttgtggggcaaggccgatttgcttcaacgcaatttgcagttaatcaatggcgacaagttatagccctaggcccatcgttcaataccgcactttctttaattcaatcacttgaagcagttgcctatgtaaaccagcagggttttgtttttattaaacgacgtaatacaacgaaaagtgagttgcttacgagtgttttagataacaagtttcgtccattgcaattgaatgaagaacggcttgcttcaagctctgttttgaccataaacggtcatgcctattttgcgattggtaaacaaagagcagctgatagtcaagattatatcgttttgatctatgacctagaggctatttcattgtggcttaagaagatagcacctagtgatggtgagtttatctttattaatcaagataaccaagtgattgctagttctaaagacatattaaagagcgccattaatgcgacaggatattggccagatatcgttgaaagttcaggctcgcgctatcaaagtcattttgtacaagatactaccaacttacctattcatacgcgttttcacgaatcacttagggcattgagtaagcctattggctatgacatttttttagagtttatgtttttaagcgtctttttagtaatgatgtttagtgccgtgttttggttaagccaacgtatttttgtaaaacccatgacgcatttaatgaattatttagagcagcatgatgagggcaagcaagcgcttgtaagttacaaaattcctgctaactggcagccttggtttagtcgtgttaagcagatctttcgacgcaatgaagagttagtacagtccttacaagaagccaataaaactttagattctcaagtacaagtaaagtcgcaacagcttagaagaagtattgatgctaaagagcgtcaattagcgttattaaacaccatgctcaacaatgttccggatattatttattttaagaacattgatggctcatttttggggtgtaataaagcatatgaacgctacataggcttgccacaagaaaagttagtgggtcagcaattatgtgatatcagtgatgataatggcgaaatcaacgagcttgaaaagaaagtgctcaaagacaaacaggtttatcaaaaacgtttatcaacacaagataaaatctatgatttgagtatagtgcctttttataacgagcatcagcagtttttggggactatggcgattggtcgtgatattaccaaacagtatgaagcgctcaatgcgttgcaaagttcagaagctaaattacgaagtgcaatggagtatgctgccaatggcgtgctgttagtgtcacttgattatcaggttttacaagtaaataaagcggcaaggaagattttttcaattgatttaggtaataaatcacctagtcactatacattggaagacctatttgctgagcaatcatttaatacattaaaagagacgttactagatttactcaacgagaagaagaatgtctatcactttagcctgccacaacaagagcaaaagcgatggctacaaattagtgtttcattagtgtttaatggcgagcaaacacccgactactatgttgtgcatgtgcaagatgttacagcgcttgtgcaagcaaaagacgatgctgagcgagcaacactggcaaaaagccgatttattgcaaacttaagtcatgaaattcgtacgccgttgaatgcagtgttaggcttaattgatgtaattgctttacaaggcttatcagctgagcagcgtactcatgcagaacaagctaaatctgcggcaaatagtttacttactttacttaatcgcatgcttgactttgctcgagcagaaaactcgcaaatgcaattaagtaatgcgccatttagtgtttctaatttaattgagtattgccaaggcttgatcgcaccactgtgcagaaaaaaaggcttaacttttaatattgaatgtgatgatgatatcaatgacagcttaattggcgaccaaatatgtttgcaacaagtgttaggaaatttactgacaaacgccgctaagtttacagagcaaggcagtgtcaccttgtgtatgaagctcattgaacaatcaacagagcagcaacttatttgttttaccgtcaaagatactggtatagggataagccaagaagatcaaagtcgtttatttgatgcgtttacacaaggcgatgaatctcttactcgttcacatcaaggcgtaggacttggtcttgccattgtgaagtatgaggttgccttgatgggaggggaaatcaagcttgagagtgaaaaaggcaaaggcagtgagttttacttttgcttacagcttgataaaaccacagagccggccaaaaagtctgtggtgtcgttaccctctaaaatggatttatcaggcttactcgtacttgctgtagacgataacccactcaatttaaacataattaaaagtattctagagcaagcagatgttaatgttgtttgtgcagacagtggtgaaaaagcgataaagcttgcaaagtcattgcaacctgatctgatttttatggatattcaaatgccagaaatggatggttgccaagcaacgcgcattattcgtcagacatttagtaaacaacaaataccaatctatgcattaacggcacacagtgaacctgctgacatagagcaatcagttgcagctggtatgaataagcacctaaccaagccaattgttgcgagtaaattatttttagccatgaatgaattggaacataaaaaagaatcctttttcgatcaagactttattctatcccaatttggaaacagcactaagttagtattaactatgttgtcaaagtttgcgattatggcacaagagcagttattactcatatctaaagtaaacactgcgcaagagctgatacgtgtggtgcataatcttaaagggtcagctggaaacctcggttttaaacgtttgtcagcgtgcgctcaggaatgtgaagttaagctgaagaaaactggtgaactgcccgaacaattaaatgatgaattgcaatgccaattacagcaagtgattgcatttatcatcgaacaaggatctacacatgttgaaaagagccaaggtactgattgttgatgatgatccgttaaatcgcttggtattagagaaaacgttgcagcaagactacgatgttttttgtgttgaaagtggtgaaaaagcactgacgtttttgaaaactcaagctgtcgacttgttgattttagatatagtgatgcccggcattgatggttacgaggtacttggcaagttaaaagaaaatgccacaaccagcatgttacccgttatctttatttccgcgaataacagccatgatgatgaagcaaagggccttgaattaggtgcaatggactacatcactaaaccttttagtgctgcgatagttcgtgcaagggtacgcaatcagttattaattaagcaaaaaaatgaccttcttgaaatgcttgcttctattgatggcttgacggaaatacctaacaggcgttatctagatgagaatttagctcgtgaatggcgtcgaagtcgtcgagactgtacaccgttatctgtgctgttaatggacgttgatcactttaaacgctacaacgattgttatggacatagagccggggatgattgtttgaaaaaaattgctcacgcgcttgtgggggcatgtgagcgcggcagtgactttgtagcacgttatggtggtgaagagtttgctgcggtactgccaaacacttctgcaaaagaagctattgcatttgctaacaaactacgcgatgcagtgaataaactaaatatccctcataaagcgtctttaaatgctgatcacattacgattagtattggtattgccaccactgaaaccgggcaagtatacgcagagcaaactttattagaagaggctgatttaggtttgtatcaagctaaagatactggacgcgataaagttgtttcaaggatggttgcggtaaatgaatcagagtaggcaaagcctactcttaactttagcttgctaattagccgttacttagcgattgataaattgtatcgcccacgccgattaacttatcatttttaaatactaaaggtgtgcactcatcttttgtcatcttgccatctgaatgaatgctatgcgtaacataaaatagcacttgatatacatcatcaccttgttttagcagctcggtaaagttaggtgtatgaagtttgtttaatactgtttgataactggtatcgagtgcaaggttagaaataatttcacgattatttttatgttgtttctcccagcttgatgaagaactacctgcccaatgtgtatcggcttcgccatctgaaactgcaataacgcaacctgttaagaatggagcagatagtgcagcgattagaagagcttttttcattttttttatccctagaaattcgagtttaagtgattgttagaaagcaatcagcttgccaactttaaaaatctttttaaatcaatgttttgtctgttaacttacatgcgtggtaggctaaataaacacgtagattagtctgtttgactaatttgttgtattttagactaatctattccgtggttcgccttggttaaatgcttggatatttaaagctatttcgttaactaagcgagcgattgattcttggcttgcccatgcgatgtgtggtgtgagtaataagtttgcgcctttgtatagggccagcgggtttgtttgctctgcgggttctttactaagtacatctacacctgcgccagcaatgacattattagctaaagcgtcagctaaatcggcttcattgataatcccaccacgagcggtattgataataatagctgacgatttcatcatgcttaattctgccgcggctatttggttgcgtgtttcatccgttagcgggcaatgaacactaataatatcggctttgcttagggcatcattaaaactaacacgaccttcacgaggggtatgaccttttcgctcactgataatgacattggcaccaaaggcacgcgctacatcagccactgccttacctaatgacccataaccaacaattgccaatgttttgccggcaatttcattaaagctgtaatctaagcgacaaaacattgggctttgttgccataaaccttgctgacaatcattaatgtatctatgagtattacccaataagttagtgattaaggtgaaggtatgctgcaccacgctcggtgttgaatagcccgccacatttgtcactgcaatgttatgctcttttgctgcctctaaatcgatattattagtgcctgttgctgcaacgcatattaatttcaaattagttaactggctcatagcgtgctgatcaatcaccactttattactgataattacatcagcatcttggcagcgctcaacaacttgctcttgggaagttagatcgtaacaagttaatttacctagctgtgctaaggcatctaacgaagtgttggctaatgttgctgcatcaaggacagtaatattcatgtgctttccttttttaatttattgcttgaccttggggtgtactccaaggtttatagtgagcataataaataaacgcttcacaatggagacggtgatgaaaataggtgagttttcccgccagttgggtgtctcaacagatactctaaggtactacgaaaagcatggtttgttaacgccaagttcgcgttcagacgtgggatatcgtttttattctgaggatgactataagcaaatggcgtttattctcagagcaaagaatgttggctttagtttggctgagatcaaagagttgctgcaaattaagtttcataaagatcagcactcttgccatgaagttaaagagatgacgttacaaaagcgcgatctcgtagcacaaagaattgcggagcttacccgcttttatgactcactttcattattggctgataaatgttgtggtggtgaagaacccgctgaaaactgttcaatactaacgacgctggaggatatcgatggacttactcagtaatttttggcatctgtttttactctcggcgccttggttaatgctgggcttattcatagctggtctgttaaatgtgtatttgcctgctaactttcttaaccgtcatttaggaaaagaagggctatggaccacagttaaagcggcttttattggtgctcctatgccattgtgctcatgtggtgtgatccctgctgccattggtttaagaagggcgggggcgtcaaaaagtgccaccaccgcatttttagtttcaacccctgaaacgggagtcgattcggtctcggtatcttatgtgttacttggcccatttatggcggtgatacgtcccattgcggccgtgtgtagtgccattgtggcgggtgtattagtgggcaaagacagtgagcttcatcaacagcaaagcacaacagcaaataaagagaacactaaaacaacctcttgttgcagcagtaaacagcctgagcctatgaccacatcgagttgttgcagtaaagaggcgtctgctaagcccgcacaaagttgttgcagcaagcaaacaactaaagaacttgaggctgttaaaacaacaagttgttgtagtaataaaggttcacaagctactccagagccgcaacaaagttgcgcaactgaacaagcagtaccttcgcagaaaagctgttgtagcagtgggcagccaactaaagccgttgaaagccgctttggtaagctgaaacgtgctgtgagctttagttgtaacaagttacttgaagacaccatgatttggttaatgattggtttattctttgccgctttagtacaaacctatgtgccagaatcttatttaagccaatggggcagtggcatacttgcgatgcttgtggttattttaattagtattcctatgtatatttgcgcaacagcctcaacaccgatagctgctggactattactcagtggtgtatcgcctggtgcagtattagtttttatgttggcaggccctgctacaaatattgcaaccttaggtgttgtgggtaaagaactaggtaagcgtgcagtggttgcttacttaataggtgtgattgctacagcgttggcatttggctttttaactgattatttagtgacgcaatatggttttgtggtggcaccgatgataggcgaagagcatgaagttttaccgcattggttaagctttatatcgggcattgtattggctactttaatgcttagattagtgttaaaaatggttctgaaaaagtcctcgcaaactggtaagagcattgcataattacttgttataaaaatatattttactaacatttggcaaataacttggttaactatcgcgtctcggttcgcatttaaaattgcctgagttataatccgccaaatatttaaacggtgcgctgtgcgtgccgttttttaacttaagtagtttttaatgagtgaaagtgtggataaatacgccgacataagaccttacaatgatgatgaagtcgctgattcagtagcacgtttaattgctgataatgcttttgtggatgtaattgccaaatataatctaccgcgctttttatcctattttccatttattactcgcccattagtgcgcagccagctgcgtaaaaagtggggtaatacctcatcggttgagcaagtacagcatgaagtggcagattatttaaataagttaatcacccgtactacttctgaagtgacattttctggcatagataaactagatcctaaacaagcctatttatttatctcgaatcaccgagatatcgtgcttgaccctgcattggtgaattgggggttgtttaagcacaatatgccgactgttcgcatcgcaattggtgataacttactgcaaattccttatatcactgagttaatgcgcttaaacaaaagctttattgtgaagcgttcagcgaaagcacctaaagagatgctaaaagctttgtcgcagctttctgcttatatttatgactccctagctgaaggtcactcaatttggatagcccaaaaagaaggccgagcaaaagatggttttgaccaaacagatccagctctacttaagatgttgcagttacaaggtcgtaagcagaagaaagagtttgctgaatacgtgcgcgaactaaaaattgtgcctgtgtctatctcttatcaatacgagccgtgtgcgatagctaaagcaaaagagctttatcataagcagcaacatggtcagtatgttaaacaacaaggcgaagatattgccagcattgttgaaggctttagtacagctaaaggacatgtgcatttagcctttggtgagccaattgagtcaggctgtgagtcacctgaagagcttgcaaaaaccattgatcagcaaatcgttgattcattctttctacaccctggtaactatattgctggtggctgtaaagaagccgttgtcgataaaaaagatgcagaggcatttaatgctcgcttggcaaaagtacccgatgaattaaagccgctagttcttgcaatgtatgcgaagccttttcatcgtaaagcagaactgacaaacagtgaattagcctaaatttttagcggctaaaaatagcgttagaaagccacttttataaagtggctttttttatggttatttttcaggctatactttagttatgaactcgtcactggcaaatatgatgcaacaaattgaaatctttgagattccaagcccttgcaaagggatttgtcaggttaacaatcgagggtattgtaaaggctgttatcgaagcagggatgaacgcttctattggaataagtttactaatgccgaaaagcgtaaagtaattagcttgtgccaacagcgatataagcgttacctacaaaaaaaacaacaagcagaaaacccaccgtcttctccctcgcaaggtggttttgatttttaaaattcagttaagttatatttggattttagaaaatgcactttaccctcttcctgcaatttctgaagggcgcgagtgagcttaggaattagtgcctcatggcgtttatgaacgaaatggaagctctgcattggcattaaaacttctttatgaaaagctgcttgattaaaatctgggtgctttgttttgagcataaaatctagcaatataatgccttcaacacgcttttgggttagtaaatttaattgtgcggtaatatttcgtactttaataacatctccgccgaatgggtgtttatcgatgtaactttgagcagcaggataacttgattgaattgctaatgattttaactctttatagcgacagtgttggcaattttttaatagcacaagattaaaatcaaaaagcgggaaatcaacttttagtaggtttgggtagtcatcttttacatctgcaatacggcctagttgaccatctaaaataccattattggctgctataagggcactttggtgattaaaatcaatgatatgtacttcataacctatttctttgtaggccattttaagtaaatcaataacataacgtgcttgtggggtatccgctggtcgattgaaaattaataggttcgagctagcactagcaggaaggcaaaaaagtaataagactagcgcaaatctgagaagcagatattttgacaatgtgcattccttgcgtgtttaaaaaaccgccgttaatttactggtatgtgctaccaaaatcaaggttaatcgtatggcattaggctaaacagaccaataaaaaatgctatactggtcactattattttttagttgttgtgaatatatgagttttaatttatgtaagttgccacgagagcaaaagtatcaaatacaactggactatgaagcctctttttgggcttaccaaataaagcgaggtaaaaatacgcgggagggggtatatacaacaattaacagtcgcccaatgtcagaacaagcatttttgaaacagcagtttgagcattatcttgcacttatgagctgatatgactgcgctaaagttttgtcttcttgaaccaataaaaacaccgttagttaataagttttatgataaacatggtgctcgagggcgagcctgcaaagcagaccaagtatgggtttgctattctggtctagagattattgcagcatgtcgaatacaaaaccaatcggggtctttgtttttatcaacactttatgttgatgatgcatggcgaggtcaaaagattgcttctcaattacttacgacgttaattacagcacaaaacgcgcctatatttacttttgcataccaaaatctgattgatttttatgtacaaaatgggtttaactgtacgttaacattacccaattctttgcaatcgttgtttgagttatatgcgcatcgaaatatagttgcgatgcactgtatacgacacacagtgccaagttagcaatttggaacgtcaatgacacagttcttttccatcatcgtgctgtttgtattttttatctgtggcttgtttagtcagccagcatttgcacaggtaaagcgtttatctaccagcgaaggcttatcgcaaagctatgtcaatactatgctgatcgatgatagtggttacctatggctatcgaccgaaggtggcctaaaccgttacgatggctatcaagttgtgcatattaagggccctaatggcgagctagaagacgctattatcgaccgcatctaccaagatccccagggttatatttggattgcatcattgcaagcgggtttatttcgttacgatcctaacaccgatagttatcaacaatttattgcaaaaccaactaccgaagaacagattttcagcgagtctgtgtttagcatggtcgctcttgatgataagacgctttggcttggacgtggttgggattttgcaaaactagacttagaaactaaacaagtaacaacaatttttgaaataccagatcgagttagaagtagtgtcattcgcgatttgtacccgtacaaaggcttcatttttataggtaccagcaatggggcgtttgtgtatgaaattgcgtcaggtaaatatcgaaaacttgaacatctccaacaagaaccaactcatatttatcaaaactatgtaaagtcattcgcagttgttgacgagcaaactttattggttggtgctgttaggggcttgtatcagattgatataagtcatttagatgaaatgtttgcctctcccgagcttgcttttagcagtaaaaccttaattgatgatttaaatatttggacgataactccgaaggaaacatcaataactttaggcactgataaagggttattcgaatttactccatcgaataatgagcttgtaaaaagtacgcgtttaaaagatagcggatacacactcgctgatacgagtattattgatttagttgaggacaaatcaggcggtatgtggttggcgactaaaaatgatggagccttttacttaccttatgataattataattttagcaatgtagtagcaaactcaataaagggagatgggttatctcatcattctatatggggaattactgagtttcaggacagagtttggcttgctacccataatggtttaacagccattaatttggatacctacgaaagcgaggtgtttttaaaagattaccaagtggatcttatcaccacagagtttaccatctatcaggtgatgccttacaaagataagctgtggttacacagtaatcgtgggatcatgagttttgatccaaaaacaggccaagcgaccccggtgaaaaccgcagatccagagcaacaaaaattaataaacgattgggtccacggtgtattattgatgccatctggggatctattttacgttcaccctgactacggcatgtttgtttataatattgaaactcaagtaattacccgtttggcagggcagtttgatgaatttgagcctttcctagcctatggattcttacctgctttaacaactaagcctgattcgccactattttataatgccggcattctgtatcaagttgatcctgatacatacgagctaaccactatttatacagttccagaacagcatgagaatgttgctgttaatgtgatgtcgtacatcatagataacaacaatgtactgtggttgtcgttatctaatttcggtttgattggcttagatgctgatacttatgagcatatttacacgattgacctagaaaaaaacaaactgggtacattgctctacgacatggtgctcgatgaggccggtatgatctggatgagtagtcacaaagggttgtggcgattaaatccagaaaacttgcattttcagcagtttaccggtgcagaagggttgttctcaacagagtttaatagtggcgcatttaccaagctaaaatctgggcagatagtttatggtactttaaaagggtttacctatttttacccgatggataaccactaccagcaagcgctgattgatcatgtcaatattactaaccttgatctaatgtctcgcgatttgcctgctgagttaaaacagcctatcgacagtgttgtccttgagcatgatgatattggtcttgaggtggctttttcggcgatggcatttaattatcaagaacgtatcatttacgagtaccaactaggtgatgggcaaaaaacatatacgcgcaataacaatcgcgttctttttccaaaactaagtgcaggaaagtaccatcttaaggtatgggcaaaagatccagttacgggggacctgactccgcctgctattttaaatatcgaagtaaagtacccaccatggcgagccccacatgtcatagtgttgtatttaattttgatagttttaattattgctgcatgggtatttagacgtaatcgcatgcagaaaattttgctggctgctcataaagaaagccaagaaagtgaagcgcggttaaagcttgctttagagggaagtcattcaggggtgtgggattggtcgtcacaaagccctattatttatcaacctcgtcttaggaacgagctgggctatgataccgacagtgttaatttagatgactatttagcaaaaattcatccgcatgataagcaaactttccgattggaatggctggagtttttatccactcaaaaaggttactttaattgtacttaccgattacgtcatgccaatggtcaatggcgatggtacaaagattttggcaaagtggtcgaatggcaaggcacagcccctgaaaaagtagcgggcacgtacactaatatgacgcgtgagttagtgtttgaagagaatgctcgtctctttggtgcagcctttgaacaaacgagagactgggtatttatcatagataaaaacctgcgtatccgcgccacaaataaatcacttcaagatgcctttgattttcccgcagagccgcgctcaagccgctctttaacgctgggattacctgtatcggctcggatcaattacttacgagttatgcaaaacctacaatcgggtgagcattattccgccgaagatgtcgtggttgtggcaaacggtgagaaacgacaagtattgattaaaattagtgctgtagcaggcagcaatcgtcagctcgatagttatgtgatcattgttactgacatcagtgcacaaaaactagctgaaagtgaactacatattttagcaaactatgatgcgcttactggtttaccaaataaaacattatttaatgaccgtgtgaatcatgcgattgagcaagctgattatcatcaaaccaaagttgccttattaaatgttaatatcaagcgttttaaatactttaatgactcacttgggcgcgaagaatctgatgaattaattaaacgagtagctcagcggttaaaaaatgtgcttcgacctcaagatagtattgcgcgatttgatggcgatgagtttgtgattctagctgaagattacaaacaaatagatgagttattgttactgtgtgccaaggtgatggactcagtagaaaaacacatagagctaagtcagcaagccgttaaggttaatctgagtgttggggtggccgtatacccagatgatgcaagcgggactaaagcgttgttaaaagcggcaaacgttgctttatatcatgctaagcgtcatgtagaggggtgttatcaattttataaacaagagatgaatttacaggttcagcgtacattgcatcttgaatcgcaattgagtaaagcttacctagagcatgagttttgcaattattaccaaccaatagtcagtgcaaaaactcatcaaatcgctggtttagaagtgttacttcgctggcctagtaacgatgtatatagccctgaagattttgctaatgcggcagaaagttcaggactgatcaccaaaataatgctgcaaacgttatcgcgagctcttattgagttgcgtcagtggcacataactcatcctgaactgtatatctcaattaatttatcggcccttgattttgaaagtgtgaacttagttgccaacattgaacacactctcaatgccataaaagtaccggccagtgctgtcgtgtttgaaattaccgagtcggtgatgatgcgagattcagaaaaagctcaacaaagcatggagaaattaaagcagctaggctgtcgtatttatatggatgactttggtacaggttatgcctcgttaacctatttaaagcgtttcccggttgatgtgctgaaaattgataaaagtttcgttaatgatattggtgttgataaaggtgatgaggcaattatcaactcaactctaaccttggcaaaaagtttaggaaaagagtgcgtcgcagagggcgtagaaactatccaacagctgcgttttttacaggcaaaagactgtgagtattttcaaggttatttatttagtaaaccggtacctggtgatgcaatagggccgcttttagataagagttggcatcaagagtttcagggataaagttactgactttatccctttaattattaatcttggcgtttaccgcagtgacggcaatacaggttgcgattgcggtttttaagttcgttatgaatcgctttatttgcctcttgctgacttaaacccagcttataacgtaggttttctaagtgttcttcttcaacaggcgataagtgcccatcttcaacggcttcgtgtactgcatcggtaaatacttgtctacgtttacgtaactgctcagaaaagcttgaagctagcaaaccggttggaatagccaccatgcccatactcactaatgtaatggcaccaccaaataagcgacctaggggagtcacaggcacgacatcgccataaccaacggttgttagtgtcaccattgcccaccacattgcagcagggatggagccaaatttatctggctgtacatcgtgttcaattaaataaataccgcatgaggcaattattagcaccacggccataataaaaaaagccgcaagtagtgagctgctttcctctttaaatgagtttaagagtagttgcatcgcccttgaatagcgtgtgagcttaaagatacgcattaacctaagcactcgtaagaagcgtaaatcaacactcacaaagaccatcagaatggtaggtaaaattgcgataaggtcaatcagcgccaacggcgaaaagaaatatttaatacgaatttttgagtttgtcagcgtgctttctttatgcacgcttttatctacacaagaccaaagcctgagcacatattctaaggtgaagataccgacagaaatcagctcaatcattaaaaattcgtgatgatattgctttgctaaagggccaaccgactccagcacaatcgccaccacattaatcatgatcaacgacatcaaaaatacgtcgagagcgcgtcctatacgtcgatatttaccgttaccttcaaaaactcgtgcagtgtaatttcttaaacgatgcaaaatagtgatccagttttagttaagttttagcaccatgttaatgctgccttcttcaaagtcgcgggtgattttaaacccgagttttcgtgctagttcaatcatgcccgtgttttccggcaaagtaatgcctgcaatttgtttaacgccttggtttttacaatgctcaatcgccgcattcattaatattgtaccaagccctaaaccttggcaatcagagcgcaccacaattgcaaactcagcatcgagcttgtcaggatccatcaatacacgagatacacctagcgtgcaggctgagccattttgttcttggctaacaataaacgccatttctcggtcgtaatcgatttgtgtcatttttgcgagttgatcatgattaaattgcggtaattcaccgaagaaacgcttatatctgtcttctttacttaatgattgatcaaactctaagtgagcttgctcatcttccggtttaattggccttagctgtgcttgggtattgtttttaagtgttacttctttaaccaattcaatcgggtaggggcgaatgcacaagcgtttacggttcgcttttgctttataacggctaaggccgatagtcgcatcaaggaccaaaaactgcccgttgctggctaaaataggatttagttcaacactggtaatgtcaggttggtcgataacaagctgcgagatgcgggtgagtagggcacataaacggtatttatcgactttttctggtagcacgcgatctttaagtacgcctttatcgtgcgccgcagcaatcaggtattttgccaagttcatattcagtggtggtaatgccactgcagcttgagcgaattcaagtccggtgcctgcttcacccagtaagatcaccgggccaaaattaggctctgttttaatagcgattcgtagctcattagcacctgctcgtggcgccatcttttgcaatgaaaagccttcaatatgggcatcagggtaggtgtttttgattcttagcagcatggcaaaagctgtttgctcaacttcttgcgcatcatttaaattaaggaccacaccaccgacttctgatttagaaggaatacttgggctaattagttttaacgctaccggaaaacccagctcaatggcttgttctttggcttctgttggtgtgtaagcaacctcagtttgaatacaatcaataccataatgagtgagtatttggcttgcttcatgggttgataaatagctttgctcttcggctaaaaactcattcactacagcccgagctgcgtctttatttatttttgcatcatcggtgtttgattctggcgtttgcgttaaatgcttttggttacggcgataacttaccaagtgcataaacgcaccaaccgcaccttcaggtgtacggtaggtcggaatggcattattagcgcagactttacgcgcggcatacgcggcatcttcgcccataaagtttgtcataacataagggcgagccatcttcgggattttttctaaggtttcgacaataatctcagcatagtcttcactcggtgcaagcgcagaaggggtgtgaataatcagcaggtttttaacttctttggcttgcaataagatttctaaggcttgttgatagcgtcttggtgctgagtcaccaaaaatatccaccggattagaggtcatttctgattgtgggatcactttattcagcgctgctctggtctcgtcgctaagctctgccagctttcctgagctttgcaagagcgtatcaacggccatgacacctgggccaccaccattggttaaaatagtcagctgttcgactttaagtaatttagggtgcattgccagtgtttgtgtcgcagcaaaaagctcccgtaagtcatttacccttagcatacccgctcgctggaatagcgcatcatagactgcatctgagctttgtttgccaccggtatggatctctgcggcaagggctccggcactagttttaccggttttaatggctattacgggtttactaaacgcagcggctcgtgctgcagaaataaagctgcgaatatcttcaatattatcgatatacaacaagatggccttggttttagcatctcggcctaaaaagtcgagtaactcatcaaagtcgatatctaggcaatcacccacagacacaaaatatgaaaagcctatctctttgtttttcgcccaatcaagaatggttgagcaaacagcagctgattgcgatacaaaggcgagctttcctgggcttgcaactgtatgcgaaaaactagcatttaagccaatatgaggaatgagtaagcccaagcaatttggcccaagcaaagatacattagctgcaagggcagcttctttcagtgcttgtttttgttctacgtttaatcccgcagcaattaccactgcatgtttgcagccaagctcaccaagctcattaatgatgttaattaaggtattcttgttagtacaaataaccgcaaggtcgggtacttttggtaacgctgctatacttggataagctaatacaccatgtacagcactgtgatttaaactaacaggcatgatagggcctttaaaacccccttgcagcagattgcgcatcaccacaaagccagcacgatttggagagttagaggcgccaattacagcgaccgatttagggttaaaaaattggctaatacgtttaacgctcatgctgtttcctttgcttgcgctgtttgttaaaacttcagggtctgttaagtttaatacacccaaactagaaccgacacgcttctaaagtattaatagttatactcataagataacctgtttataactacttttcgagtcaaaaacagtgacctacatcaaggagaaaagcatgaataagacgcaaccatttaatatcgttattgcagcgtgcgcattggcggttggtttgcttggattaggttttatattgaaaagtgcagcccttgatgtaaaaggcatggagcgcaccgtccacgttaaaggtttagcggaaatggaagtgccagcagacaccgttatttggccattgcagttttctgatgccgataacaacctcgaaaaactagttggtcgggttgaagagaaaagcgatgcggttgtggcttttttaaagctacatggttttagcgatgaagaaataagcctcggcagccaatcaattattgataaacaagctcgtgaatatggcggcgaaaatcagcagtttcgttatattgcccgtaataatgttattgtttattcaaatgacattgaaaaagtacagcatgcgctaggcgaagtaagccaattagctaagcaaggcattgcgatagtacaagacaattacgaaacgcgtattcaatatttatttaatggcttaaatgaaatcaagcctaatatgattcaagaggcaaccgaaaaagcccgtgaagtggcaatgaaatttgccaaagattctcagtctaagttgggtaaaattaaaaccgcccaccaaggccagttttcaatttctgatagagattcaaacacgcctcagctgaaaaaagtgcgtgttgttaccagtgtagaatattatttatctgactaaacccaataccacagataaaggcagccgcatgcgtgtgcatacaattaccatgcggcaaagcgcaccaagcataaaaccaccactaaacgccacagccacccccaataagccaaactgatcttttaacagcatcgccatcaaaaccgtgatgctggttgcacccagtaatacatacaagttgatcagcgggttcccttttaacttgatcatactactggctaaaattcttgctggtagtaacaactgaccgagtaacagcagcattaaaatccaaaacccttcttctaattggctttcaccatataaattaagtagcggttttgcgagcagggcaagtagcaagatagcggcaaagttaaagcgccacagcactttcattaactcactaagttgctgaacggttgtctcatcggccattaaaatgggttttaaatattggttggcggcattgcctaaaatagtcagtaagccggcaatcaccaccgcaggaaagaagatacttacgccttgtgcaccaaaccagtgatgcaccagtaatacatcgagttttgcgactaatacagtgcctgcaccactggcgagcatgatcaatgagtctttacaccattgcttggtttggtagcgggcagtacttgcgacgatcattttcttgattaaccaatattgataactgactacgcacaacatgctacaaaataacaagatgcaaatctcgactaaagataagtcgccacgtatcaaataaactaagaaacaaaaacccgcggttaataattcaaagatacattgctgcgttatcaggcctattttgggtttgtttaaagccactaaaaaagcagattggctttgcataatggcgccaatcggcaccagtaacagtaaataaattacatgttctttggcgctttgatgcggcgaaatggcctgaaagctgatcaccacagctgcaacaaaaatcaccccgaataaacaagatgcagctaaataaacatgctttaagccacgcagtaaatcatgttgttgagctttgtagagcggatagctaatacgcattaacgacgatgcaaagcccatgctcgctggtaacaaaagaatttcacaaagtgcgagtaacgcggcgaaagtgccaaactcatcattacttaataaccttgcaaggcacaaggtaagaacaatacggctaccatggttaagggcggtaaaactgctgagcgataaaaacgctttaacaacatccttattcatgaagttattgattaagggcgtttaataactgcgccgttggcacttgcaaataggccgcacacagtaaaactttactgtcggcactcgttggttgattggcaccataaaattgtttaagggtgtttattaaggcactgactgcgctagggctgtggctttggtcgacttccatcatggctaataatgcggagaactcatgttttgctagcatttgagtcgtactgttttgcgctataaagcaaccaataggagtgagctgctgtttattcaatgtttttaaagcaacgcctaagctttcgttgctttcaaataacattaacgagcgtaaatagttaaaggggagtttatctgcctgacacagcgtaaataaatgatgtagtagggtgttaccttggttgtctgtaacacaaaaggcattttgaaacttaaggccaggcgtgaaaaagctcagcttatcaatatcatcaatcaaggctacagcttcgcttggcagtgggcttgcttcaagtaaatgcgcagcaacattttgtaaaaacaggtatttaacttcactactgcacgctaattgatagatatgctgtaactgtgccgcttgtaaaacccccgacaagctttgataatcggcaataagttcttttaactgatgatgttgaagtcggctgttcagttgctctatcgcgctttgcatggaattacccgttttttattatttatacatttatagctcaactacttgtttaaataaataaaaaaggccgctgagcggcctttttcaagtttttattgattaagctgcttgtttcttagcaacccattggtcaacaaacttctctagtacatttaatggtactgcaccatttttaagtactacatcgtggaattcacgaatatcgaatttatcgccaagtttttctttagccccttcacgaagctctaaaattttcagcatgcccactttgtatgccgttgcttgtgaaggcattacaatgtgacgctcaaccattttaacgccatcagacgtcgcatttggtgtgttatttacgtagtagtcgataccttcttgacgtgtccacttcatagcgtggatacctgtatctactactagtcgacatgcacgccatagttccatagcaagacgaccaaaatctgaatatgggtcttcatataagcccatttcttttggtactagctcagagtataaaccccaaccttcaacatacgctgtgtagccaccaaacttacggaacttaggcacatcctcaagctcttgcgcgatagcaatttgcatgtggtggcctggaataccctcgtggtatgcaagtgcttccatttggtatgttggcattgcttccatgtcgtaaaggtttgcgtaataaatacctgggcgtgaaccatctggcgcaggttgttggtagaacgctttacctgctgctttttcacggaatgcttctacagctttaactttaaggtcagcttttggcttaacaatgaatagctcgtctaaacgagatttcatgttatcgataagcgccgttgcttcatcaaggtaacgttgtttaccttctgccgtgttagggtagtagaactgcttatcagttttcatgaattgcatgaatgctttaaggtcaccttcaaagcctactttgtctttgattgcacgcatttcgtcgtgaatacgcgcgacttcagctaaaccgattgtgtgaatttctttcgcagttaaatcagtggttgttgtacgtgctaaggcgttattgtagaacgcttcgccgtcagggaatttccaagcaccatcacggtcatcagcgcgtttttctagctgagctaagaaattaattaacttagtataagaaggttttactgctgcttttaaggctttttcagcatcgctgataagtactgatttttcgctatcggcaatctctaatgcgttaactttacgtttaaagtcagcaagtaatgttgagtcttcaccgtcgtggaatggtgcgccgcgtaagatattttggcttgaatcaatcacgtgtgggaaaacaaacttaggcgcgataatgcctttatctgcacgtacttcaaggtctttgattagttgatcaataaccgttgtaacaccatttaaacgtgagatatacgcttttgcatcagagacatcggcaatttgatgttggttgattaaaaacgcagggatcattgagtgaacaccaaacatttggttcaccgggtagttgtaatgacgccatttgaaatcagcaatttcgttttcaagatcttgctttttaaggtcgtaacttacttttgttgcgtcatctaataggtcgcggttaattgcgttaagcgcaactaggtcagctttagtttgttcaaagtcttctaaaacgcgctcttcactgccatcgtcccatttgtcgtaatcttttttgatgcccatgtatgtttgataaatagggcttttcattacgtcacggttaaaagtatcttcgaagaaggcattagctttatcgatttcactttgtacaggttggctttgtacacttggtgcaggcgttggttgctcttgcatttgttggcagccgccaagtaatgcaacacttaccgccgcagcgatgaaggtcagtttacgcattatcgttcctttgtagttgttagaaatttaattataattcttaaacgaataattctagcaggtcattcaaaaaacgttggcctttagggcttacctgccagttatctttatcatcaattagtaggccttttgcaatcgcttcagtcaaggcttgttcctgactttgcagtgacaaacttgtaagcaaaggtaaatcagctttcggacacggttcgactaagcgaaaacgattcataaagaattcaaaggctaagtcgtctttggttacttgccattgctcatataaatacggtttagctagatccatataaccgcgcgggtgtttaacttttaccgaacgggtgatgactttattttcatcagtaattttaccatgagcgccacagccgataccgagataatcgccaaatcgccaataattcaggttatgacggcattggtaacctggctttgcgtaacctgagatctcatattgctcataacctgctgcagctagtaaggcttgtccttgctcttgaatatcccaaaggatgtcatcatgaggcaaggtcggtggctttgacgcgaactgagtgtttggctcaattgttagctgataccaagaaatatggggaggattaagggcgatgattttttcaaggtcgcccaaggcatcttcaacagattgtccgggtaagccatgcattaaatcgaggttaaagctgtttagccccgcttggtgcgcctgtttagccgcatagcttgcttcatctgcaccatggatgcggccaagggcttttagcttgtcgttttgcatgctttgcacaccaatcgaaatacgattaatgccagcagcaacatactctttaaagcgaccggtttcgacagtaccagggttagcctctagggtaatttcacagtcatcgcttaggccaattaatctgtcgacttcaccaagcaggcgagtatatgcgtcaccagttaataagcttggagtaccgccaccaataaagatactgtggattttacgcccttgtactaggtgcaaatcggccttgagatcatcaataagatgctgaacgtattctttttcggggattgtgcctttttggccatggctattaaagtcacagtatgggcacttttgcacgcaccaaggcacgtgcacatataaacttaaaggcggtaaactcacaggccgcctttttgctgcaattgcgcaagtagttgttttaaagcttggccgcgatggctaagggcatttttttgctctttagttaactgggcgctcgtgcattgctcagacggtacgtaaaaaacaggatcataaccaaacccaccctgaccatcttggctatgggtgatttcgccttcccaactggcactacaaataagtggtgtcgggtcgtcggcgtggcgcattaatactaaaacacaccaaaaacgcgcactacgaacagggttatcagcaagctcttttaatagcttgtcgatattatcttgatcactcgcacccgctccagcaaagcgtgcagagtacacacccggcgcaccatttaggccgtctacttccagacctgagtcatcggcaatcgcaggcatgcccgtgatctttgccgcatgacgcgctttaataatggcgttttcaacaaatgtggtgcctgtctctggtacgtcaggtacttgaaaatcactttgtggaaccacgttaatattaagtgggctgagcatacttgccagctcttttactttgccaggattacccgtggctaaaaccaaggtgttgttcatagggtctattaatctacgtaaaatttttgctgaaacttcagcgtttgtactttgccattttgattaatttcgatatcaaaacggtaaatttcttcgttgctgtaatcgatttgcgcgaggtaataaattgcatcgccttcaaccacctctttaaattcaagctgctttttattgccaagcaggttgcgcgctgtgcctgttaaagttgcagtctgcgctgatttatcgctgttttttaataccgaaatattgattatccctttgttagggctgcggtctaaatcgtagtttttggcgatgctaggctgaataaaggtcgatggaaatgcaatgtagtgaacttcccaagggccaagtaccttatactgagcgcctgcttgttcatctgcctgggcaagagttgtaaataaactcaataaaatcaaagaaaaataaataacttgcttcatgctatatctcacttaacaaaagaggcctttcggcctcttgatgtagttgttattacttagcctataaaatccatcaataagatttgtaaaaactgtagaccaatgatcagtactaaaatcgataaatcaagaccgccaagtggtggaatgattttacgaatagggcgaagcataggttcagtcagctgatgaaaaacggcctcaataggattgtaaccttggcttacccagctcaataatgcacgaattattaagacccaaaataacagatttaagccttcttttattacagtcattaaagcagatacaaatacaggtgctggagaccaggtaccgtaaaacatcagtaaaatcacactaattttggctacggctacaagatatgcaaggactaacgatgccatatcaaagccacccaatcccggaataattttacgaagaggatttactgcaaatgatgttgcctttactacaaattggctaattggattataaaagtccgcttttgccgtttgtaaccaaaagcgtaaaaggaccaccattaaaaagagatcgaaaacaatcccaactaaaaattgcatggcttgcatagttttaccttcaaaaagtaagcttaaagttctttttccattgcctgagcgcgagcgatacaggcgtccattgcatcagcaactgtagcgactaaaccttgtgatttaaggtgctctaccgcttcatgagttgtaccgcctttcgatgtaacatttgctcgtaactgagtaatgctgatatctggttgtgaaagtgccatttcagctgcgccgagcgccgtttgctgtactaagcggcgtgcatcttcatcactaaaaccaagggcttttgctttttcttcaatggcttccataaataagaaaaagtaagcaggtgatgaacctgtcacagcgataatatcgttaatttgagactcgtgctctacccatttaacaatacctgtacactcgaatacctgttgaacaaactcatgttcttcagcggtttcatctgcgccgaataatccagatacgccacgaccaagcaatgatggtgtatttggcatacaacgcaccattttcacatcttgacctagcatttcacgtaaacgttttacggtaagacctgctgccactgaaataaatagcttgtcgctaaaatcaacaccagaatcttggaatgattggcaaagatcacccatcatttgtggtttaacagacaagacaatcacatctgcatcgcgaagtgccgcgttgttatccgcggtagtttgcaccccgaaatcagcagcaaccttagctaatttttcttggttgcgattggttgcaataatatttttagctgcaaaaccgttctttaccatgccaccgataatggcgtagctcatgttacccgtgcctataaatgcgatttttttgtctgacatatgtctgttatcaccttttaatttcgttggccaaatatatccgtgccaatgcgtaccatggttgaacctgcagcaattgccgcttcaacatcattactcatacccatcgacaaggtgtctacttggggatattgggcctttagtttatcaaagcaagcgcttaattgctcaaaatattgtaattgttgcgccgtatcgtccgttttggcgggaatagccatcacacctctgagacataaattatcacattgactgataaattctgccaatgtcattacctcgtcggggtggcagcctgacttagcctcttctaaactaatatttacttgaattaatacattcagcggtgatttatccgagggacgttgttcgttcagacgtttggctatttttatacggtcaacactttgcacccagtcgaaatggctggcaacaagtgcacttttattcgattgaatagggccaataaaatgccaaacaatatctttgtattcagcaagggcagccacttttgttactgcttcttgtacgtaagattcgccaaacaatcgttggccttgttcataagcagcaatgatatcgtcggttggtttggtttttgagacagccaataggtttattgattgctcattacgttgattattttttgcagcttgcgcaattctggcataggcggatgtaagtcgttctgctattgtaaccatataattatcagttggttgtggagtcataaatggatattaccgaattattggcctttagtgtgcaacacaaagcctcggatttacacttatcatcaggcgtatcacctatgatacgcgttgatggcgatgtacgtcgtattaatattccagcattagaacaaaaagatgtaaatagtctggtatacgatattatgaacgataatcagcgtaaggactacgaacaaaatcttgaagtggatttttctttcgaagtacctaatcttgcgcgttttcgtgttaatgcattcaactcaaaccgtggcccggctgcggtgtttcgtactatccctagtgatgtactgactctagatgatttaggtgcgccggatatttttaaaaccattgcagataaccctcgtggtctcgtgttggtgacagggcctactggctccggtaaatcaacgacactggcagcaatggtcgattacatcaatcagaacaagcaccatcatattttgacgattgaagatccaatcgaattcgtacatgagaataaattgagcttgattaaccagcgtgaagttcatcgtgatacgcatagcttttcgaatgcgcttagaagtgcgttgcgtgaagaccctgatgttatcttagttggtgagctgcgtgaccttgaaacaattcgcctcgcgatgactgcagcagaaaccggtcacttagtgtttggtactttgcatactacctctgcgccaaaaactatcgaccgtatcatcgacgtattcccaggtgaagaaaaagacatggtgcgatcaatgctatctgaatcattacgtgccgtaatctcgcaaacattacttaaaaaagtcggtggtggtcgagttgctgctcatgagattatgatcggtattcctgcaattcgtaacttgatccgtgaagacaagattgcgcaaatgtactcatcgattcagacaggtgcttcgcatggtatgcaaacgatggatcaatgtttagcaagcttagttaacttcggtatcattacaaccaatgatgcacgtgcgaaagcgcaagataaaactcaatttggtggctaacggagttacttaagatgtctttacctttaaatcactttttacaagttatgatcgataaaaaagcgtctgacttatttgtttcgagccaattaccagtgagtgcaaaaatcaatggtgagcttgtgcatcttactgatgagaagctctcagatgaaagctctctggctttagttgagtctgcgatgagcgataagcagcgccaagaatttcatgacactaaagagtgtaattttgctatagcgacagatgaagggcgtttccgtgtttctgctttttggcagcgagatcgtgccggtatggttattcgtcgtatcgtgacgaaaataccggacgttaatgagcttggtctgccgtcaacactgaccgatgtgatcatggcaaagcgtggtttagtattgtttgtgggtggtacaggtaccggtaaatcaacgtcattagcagcgcttctgggttatcgtaaccgcaatcagcgaggtcatattttaacgattgaagacccgattgaatttgttcatgaacatcgtaaaagtattatcacccaacgtgaagttggtttagatacagaaagctttgaatccgctctgaaaagttcactgcgtcaagcacccgatgttatcttgattggtgagatacgctcccaagaaaccatggaatatgccctaagctttgccgaaaccggtcatttgtgtgtagcaacactgcacgccaacaacgccaaccaagccattgaccgtatcatgcacttagtaccaaaagagaagcacgataaattaaagtacgacttagcactaaacttacgtgccattgttgcccagcagttgatacctacagccgatggtgaaggccgtgttgcagctatcgaaattctgcttaactcaccgatggtggcagagcttatcaaacgtggtgatattggctctatcaaagaaaccatggcgaaatcgaaagaaatgggcatgcaaacctttgaccaagcgttatttgagctttataaacagcgtcgaattaattacgctgatgcgcttcatcatgccgactcaccaaacgacttgcgcttgatgatcaagttgcaaaataatgagcaaaaaggtgctggtttcttacaaggtgttaccatcgacggccttgacgagaagagcgatatataatgttttcgcggataattatagctgcctttatactgctggtaactgcctttgaggcgtctagtaatgttgttgaagatgttgttatttttatccgcgatgatgtttatgacgattacagtcgcttcttaaatggtcgtaaacctattgaagtaaaagactttagtggagcttacatccgccgtgatgtagttgatatgatcattgctcaacaagcgttgagcttaggtggtttcaataaatcatttcgctatcacaaaggtaatgctaattaccgtaacaccaagctgttagaagatggccagttattacttagctttgatagtgtgtggtcagtagatgcaaagcagcttgctgagtctgtgtatatttcagatcccgtgatccgtaatggtgaatattttgctggtatattcacgtccccaaacaataaaaaagcactgcaattaaagcagtttgctgactttaagcaattaactgcggtttcaacacctcgttggcaaactgactggcaaacgttatcggctctaccgctcaaagagctgctcagagaagatgagtggcttgggcaagtccgcacggtatcgatgcagtgggttgattttatgatgatgcctttaatgccaagtctcaataatcgttacagtttggaaaatattgaactggttgcagtgcctaacgtggtattgcaattaaatgatagccgccactttattatttcgaaaaagcatccagacggaaaagccgcctttgcagcaattcaaaaaggcttacagcagcttcgtaatagcagcgctattgaaaaagcctaccgagaggcaggctttattccagatttaaacgactataccgtgattaacaaagcgcgttagtcgccataagattgctcaaaaaaactttctaagatgatcaccgcagacatattatcaacgttacctttaccaaggttacggtaaccaccttgttcgaataaacgcgctttggcatctgcggttgttagtcgttcgtcttgagtttcaaccgggatagcaaagtgattatgcaaacggtttgcaaacttcttggctttaaaagtgacttcttgattgctgccatccatattaagcggtaaaccaactaccattagatctggttgccagtcatctacttgcttttttatttgctgccaatcaggaataccgtctttggctttcaccgcttgaaggcttgaggctgtgccggttagctcttggcctatggcgataccaatacttttggtgccaaaatcaaagcccataacggtgcgctcacctacgggcttaaatgttctttttgtcatagtttcaataattcatttatgttaggcatggccggcttcagagcttagctgacttacatcaaaccccaacatggataccgctttttcccagcgcttttcaacaggggtgttgaagatgatatctggatcagcttttatgataagccatgaattttctagcagctcttgctcaagttgaccctgctcccaacctgcataacctaaagtaataataaattgttcaggtgcttcattagtggttaagcttgccagcacatcttttgaagtggtgatcataatatcactgctaagcttttggcttgatgaatagccatgcttaggagaatgtaacacaaagccgcgatctgtttttacggggccgccagcataaacagcaagccctgcggcttgcttatttttgtcgttatcaatctcgattttatcgagtaattcacccacagtaatattaataggctgattaataaccagccccatagcaccctcttgattgtgctcacaaatataagtgacagcacgtttaaaaaaagggtcttgcatgcttggcatcgcgattaagaaatgattctctaatgactgcataggtcgccccttttgttgtttagattaagtatggctcagtttgctctcaatggcatcaaataacttaccagtgatagaaatgtcgtacgcggcttcaatttcttttacacaagtcggcgcagtgacgttgatttcagttaagcggtcaccaatgatgtctaagcccacaaaaataaggcctttttcttttaacgttggtgcgactgcttcggcgattttgcgatctgattcgctaatcgggcgagcttcaccacggccgcctgctgctagattaccgcgcgtttcgccattttgtggaattcgagctaggcagtaaggcataacttcaccgtcaacgacaaggacgcgtttatcgccttgtttgatttcaggaatatagttttgtgccattgcaaaacggctaccgtgctcggttaatgtttcgcaaattacaccaatattggcatcatcttctttaacacggaagatagaggcaccacccataccatcaagtggttttagtatgatgtctttatgctcagctaaaaatgcgcgaatatctgcttggcttcgcgttactaatgtatctggcgtatgttcactgaaccaagcggtgaacagtttttcatttgcatcacgcaaactttgcggtttgttaataactaatgtgccagcttgttctgcgcgctctaaaatataggttgcgtaaatatattcagtatcaaaaggtggatctttacgcattaagatcacgtctaaatcagcaagggcaacggtggctttttcttctaattcgtaccaatgatttacatcgtcaaatacacgggctttggcagctgttgcatagccttgaccttgacgcagtgacaggtcgtccatttccatgtaataaagttcgtagccacgtttttgtgcttccatcatcattgcgaagccagtgtctttttttatgttaaagccactaattggatcagagattatgcctaacttaattgccatatttttgccttagaatcgaagtgccatactgtatttagtaactttgatatatgggtatttttaccattttcaattggctaagtcgccaaactgtaattgcaatgcgcttaaaacagtcagtgcggctgtttctgttcgaagtacgcgtgggcctaagcgaatatcaacgaaggcttgttgctttgcaatgttaatttcttcatcagtaaaaccgccttcagggccaactaaaaagcgcacaccttcgctaggcacttcaatggttttaatactatgctcagctcgagggtgtagggtaagtttaattgcttcgctagcttgttctaaccactcttttatatcgataggtggatgcacaacaggcacgaagttacggccagattgctcagctgcagcaattgcaattttttgccattgttggtgttttttctgcagtctgtcgccacttagttttacaccacagcgttgactaaaaataggggtgatttcagtgatacctaattccaccgatttttgaatggtgaaatccattttatcgccacgagagatgccttggcccaagtgaattttaagtggtgattcaacgtcgtgatcgataaactcttgcggttcaacaacgactgtttttttactaacctcgatgatttcgctgaggtattcaccaccttcgccattaaaaatagatactttatctccgacttgcatacgtaacactcggccaacatgacctgctgcatcatcatcaagtgctacaggagtgtttaaagaaatcgctgaaggttggtaaatatgaggtactcgcatggctgtcacttatcaataattttagcaatatggtaagtatacagcggtttaggtgcaattatttatttgttatttaaggtcgtcttttgcacttaatacgtgagcggtggtttcggcaatctcagattggcaagaaaggtggttaatatgagcagcatcagggcagggggtaaagctaaaaccttgctcgtcttgttgaactaagtaccttatcttgtgtaatgaattataaataaacttttgtgcatcatcagccagttggtaatcagttagattaatgagtactccctgtattgtgtgatgctcgtgcaaatagctggctagctcagaaacgcttatttcattgctaaaatcgcagtagcaataatctttaattagttcatcgaacatcagcttgaccatttgtcggctattagcaccagccacaacaagtgtagagctttcagctttagcaaaataatgctcagcgaatgctcgactaaactcattgtcgatatcgactaataaaaaattattaattttatttggcataaagccccacgattcaaacacttctgatcaaattgaaaacatactaattagtaaatagcctatagcaccaaaaacggcaaattcgatacacgcaattccaatattatcttggtgatcaacttccaaagatgtatcaatattgggtaaggaaatatatttaataatgtagctcaaaacatacaataacacccacatagcaccacaatgtgatactaaagtgaataaattttctaccatcttaccactaataaaggatgcactggaaagaccagcgtagccagaaagtgctagaccgatcgatttcccggcataacgtatgccgatagatgtgttttctaaattgaaattactttgcagcgatgccccttggttggcttttgcaaagcggtactcgcggatcttagtatcaagagcaaacatgccttgtataacaaaaaagctaacggtagcaataagtaaactactaaagccttgtgtatgcgaccaattgtataaaccaagacaaatgatacagttagctatcagcatacctgaatcaaccagtgctgcgcagacattctgttttaaaatagccgcctcttcgttaaagcgatataaaatccattttcggtgtattaaatgaccaatcttaatgaaagaaaataataaaaaaatgagtatcaatacttttaaagggtttgattgagccgcgcttagacttatttcatcaaagatgtaagcaatggtagcaatgacaactaagatctcactggcaaagcttattcccatagcaaaattatcatgttgcgccagttcttctttaagggcttgttttgcctttatttgcgttaggattcgcagcagtactatggtgatacaaataaccgcaaaactaatagcaatcgcgactaaactagtgttagataatgataaatatgacatgcagatccctgctaaataaatctttgataatcattctagtacggttattggcaagttaaaagagagtatttaatgagtaattcgtatccgcttccaacgtcagttcaacagttaggccaaacccgctttactagcttataccctgatcaagatgtcgacgaaaatatcgctaagttattatcattaagtgattttgcttggcactgcttacaatcacagccggctttgagaacatggttacttgatgaaacagaatgtgctaaccgtgtggtggagtcgccattaagtaacagtgacctaagtgaacttgacgattcagcagcaatggcaaaattgcgtttatatcgtgaaaaatattggttgaaagtcgcgtatctagacttgtgttgtgcaaacccaattgctgacagcattgcttatatctctgagctggcaaaccagcttattgacagcgcaaatcaatgggcttttgcgcaagttgctaaagtaagcggcaccccagtcgatgctgacggaaatgccatccctatgttggttcttggtatgggaaagttaggaggaagagagcttaactattcatcggatatcgatctcattttttcttatcctcgagatgttgcaacacaaggtggtcgtcgttcagttgaagctcaagttttttataccaaggtagcgcaaaagttaattatggcgcttaaccagacaacagtgaacggccaggtttttcgagtagatatgcgtttgcggccttttggcgaaagtggtccattggtgatgagcttccatgctatggaagattattatcaagaacaaggtcgagagtgggaacgctatgccatgctcaaagggcgtttaattggtactgagaatcgctattggagtgagttttacgaactgttaaggccgttcgtttacaggcgttatattgatttttcagtgattgagtcacttagaaaaatgaagcatatgattgctcaagaagttcgtcgtaaacgtttaaccaataacataaaactcggtgcaggtggtattcgtgaagtggagtttgtagtgcaagctctgcaaatggtgcgtggtggtcgagaagcaaacttgcaaacgcagtcattactgttggctctaaaagagctggttaataatcaagttatgacatccacggaagcgcaattgttaaaacagaactacctagaattacgtcgtgtagagcaatatttacaaatttttgctgataaacaaactcagacacttcctgatgatgagcttaatcagcagcgcctttgttatttacttaataaggctgattttagccattgcctagctgcaatcgagcaggtgatggctgaagtacataatgagtttgagcaagtcattggctttgaaagtgagagcgcagatccctgtgaaagtgagtatattagcgcgtgggagatgacagatgttagtttgatgtgcgagcctaaccttgactggcaagcggcgcttgaagactttaaagcgcgcttaacgaaggcaaaaataggtacgcgcggcagagatattctcgacaaattaatgccactgttgcttaaacagcttactgttgccaaggcaagtggcgaagcatttaacatgataagccaagtgctgaataaaattatttctcgaaccgcttaccttgagctgttatatgaaaatccaggcgcattaaatcaactagttgcactttgctgtcatagtaaatggattggtgaacatatttcgcgctacccaatcttactcgatgagctgattgatcctcaggtgctctataaaccgacgcctttatctgcttacaaagatgaaattaggcagtattttttgcgtatagaacatggcgatttagagctgcaaatggaagcacttcgtcagtttaaacaaacacatcagttacgcattgctgccgccgatgcaaccggtgtgcttagtgtgatgaaggttagcgatcaccttactgcgcttgctgaggctattgtagagcaagcggtcaatattgcctggcatgcttgtgttgagcgctttggtcggccagccaatacttctgatcaagaaaagggctttgcagttattgcatatggtaaaacgggtggctttgaagttggctacgattcagatcttgatctggtatttgtgcataatcacgatggcagtagttataccgacggtgataaatcaattgattcacgtcagttttatttaaagctcgcgcagcgactaatgcacttattcaacacgcgaactgcgtctggcattttgtatgaacttgatacccgtttacgtcccgaaggggcatcgggcttactggctattaatttagaaagttattatcactatcagcaaactcaagcatggacgtgggaacaccaagctttagtccgttcacgcatgatttatgggcaagtttcattatacgagcgctttactgcgatccgtaaagatgtgttgtgccaagcacgtgatacagaaaagctgaaaaaagaggtcatcgagatgcgcgaaaaaatgcgcactcacctagcgaaagggaatgatgaactgtttgatttaaaacaagatagaggtggtatcacagatattgagtttatcactcaatatttggtgctgaataatgcgatgcagcatccagagctaactacttggtctgataacgtgcgtattttagctgatgctgcacgtttaggttgtatcacagagcaaatgcagcaggaattagtcgaggcatatattacctatcgctcacgctatcatgtaatgagtttagatcagcaaggtcgttgtgcgccacgtgctgagctaactcagcacatagcattggttagtaacgcgtggcagcaagtatttatagcaaacagcaataatacttaacgaaatggtattagaagtgccgttagctttttaagcggcggcagttctcgcgcacataagcagaggggagctcagtgataacagctgctctttgcttaaagcaaaagaaggtataaacctcattttcgaagtcgtcattgatggcacggccaacctgatacagtgttgaaacaaaattactatcaacacgaaaatgatctttaacgacatagtctttacttaaataccaataaagtacaatgtcttcattacgggcataatcagagagcacgtcttttaacgtattaccattttcaaagcggcgcggttgaatatcgccggtccagtttggtgacgatggttcaactactttttcgcgctcaaatagtgcaacatctaaacttgttgcaggtgttggtaacttgagaacgtatttatcacgttcgttatctttgctgtttacttggttacgtaacgcagaataaaagcgagacaacccctgagcagcggcattttttgtttctttcatatcaaataccggaccgctaccgaataaaaagtagattgcagcagcaattaaaataaaagctaatgataaatgcttaacccagaaccacatttctaatactcttgttgtttattaccttaataaaaacatactaattaaaaattgtcactctacttgtaataagaaggtgcgttcttatcatggcgcgttttaaaacgtcgatgtaaccacatgtattgctctggggcattatctatggcttgttccattcgttgattgacacgtgttacatcttttagatcatcgccacttgggaaatcgtgcaaaataggcagtacttctaaatggtagcgaccttgttcatcacgtcggctggttaggctgacagtttcgcagtttttgctattagcgaaaagcaaagtccctgttgtcgttgctgtctcttttactgcataaaaaggcgcaaactcacagcgattacggccataatcttgatcaggaaggtaatagcacacttttttatttttaagtgcttttagtaaaccctttacatctcgcttgccaattaagtattcgtttgagcgtaagcgcccattagtcgtaaagtattccatcaaaggattattatgagggcgataaaaaccaatgccttggtgttttaaacccatgacacggcttgccatttctaaatgaagaatatgcggtacaagtaacaataccccttttcctgattgctggatttgctcaaagtattctaggcccttaatggagccatatactttttttacacgccactcgggccaccaccaagccatgcccgtttccatcatggcaataccggtgttttccatatttttacgaactaattcgcgctgttcatgttctggcatatcaggaaagcacaaacgaatgttgacctcagcgatatggcgacggcgtttcataaagcgatgcactaaacggccaagtagtttacctagtgcaagttgtaatttgtgtggtaaccaagaaataagatataaaaagaacacgccaatccaagttaaccagtaacgtgggcctaaaaaagacgctttaaacggagatgaactaaccacaaaaaaatctctaaaaataaaaaagctagtttaactgtatgtctttaaaaatacaaaaagccagcgctaggctggcttttatttaaggactcaattagaagaaatgattagatttcttttaaaccctgattaattgcaataaggtcttcgctagttagggtaccggcagcttgcttcaagcgtagtgtagaaacaacataacggtaacgaacattcgctaagttactttttgcgttatacaggttttgtgtgctgatcaatacgtcaacgatagtacgtgtaccaacttcaaagcctgcttcagttgctttaagcgcactttctgcagaaacaacagcttgttgaagtgctttgtaagttgcgatgtcagagaccacttgattatatgacgtgatcactgagcgtgttactgcacgaaggcttgcttctaagtcttcgcttgctgcaacatagtaagcgcgagcttgatctgttgctgctgtcgttgctccacctgaataaataggtaagctgaagttaacacccacttttgcactgtcttcacgtggttgatgtgaattactgtttaaatctgtcaggctgtcaccataagacgcgttcaaagttagcttaggatagtgacctgcttttgctaaatcgatttggtcttttgcaatatcaaccgttactttagacacttgcaggtttaagttgttgtcttcggcaatttttataaagtcagttgattgtttactaggtgcaaccgtcgaaaaggtttctgtatttaatacatctaacttagcgtggtatttacctgtgatttcacgaagttgctcacgtgctgtttcaacactatttttagcgacaatttcttgtgctactgagttatcgaactgagcttgtgcttcatgaacgtcagtgatcgcagttaaacctaccgcataacgctctttagtttgttgtaactgacgttcgatagcacgtttttctgcttgtacgaactcaaggttatcaatggcgcttaatacattgaaataaccttcagcaacacgaacgattaggtcttggcgtgcaaagtcatactgtgcagttgcttgtaatgcttgtttttctgcaataccaagtgagttccatgcacctaaatcgaacaatgtttgacttaagctaaggccacgactgaaaacgtcagggtcataatcataaccagcatagcctgtagcatcattaccatcgtataggtccgacttggttttttcatagccaaggcttaagccaatttgtggtaatagtgcacttaacgcgcgatcgctctcataggcttgcgcatctgcttgggcttttgctttaagtacggtaggatcgtttgcggttgcgatctcgtaaacttgaagtaggtcttcagcgttacttgctgttgcagtcaatgcgctagaaaaaccaatcagcgcagcgagtaatgtttttttcattttttgttcagtccttagacaatttcgtactgccaacatggtactcttttttaatgaataaccaaaaaaaaattacgtaaatctacatgtccaagtgtaacagaatataattgacgataaattttacgtaatacttacaggaaatagtgaatgaaaatatcagcaatctcacaatttagccatgacgacatagagttaaagccaattgagcgagtttatgatggtttttttaaaattaatgtgtatcgctttcatcatgcgctgtttgctggtggcaaatcggtggagattaagcgtgaaattttagagcgtggccatgctgtagctgtacttccttatgaccctgttactgatcaagtgttgcttattgagcaaatcaggattggtgcaatggcatcaaagcagtccccttggttacttgagtgtatcgctggcatggctgatggtagtactgactacgaagaggttgccaagcgagaagcgtttgaagaagcgggcattgaacttaatgagctcgaatttatgatgtcgtatctttcaagccctggtggtacgactgagcgtttgtacttatatttggcgcgcactgacttatctgggtatcaaggtggcctttttggtctagataatgaagatgaagatatcaaaacccatgtaatgtcatatcaagaggccatgctacgtttagagcaaggcgaaattgataacgctgcaactgtgatctcattacagtggttagcacttaataagcaacgtatactgtctgattggaataataaataggggattattttggcctacgtcactgccgaacagcgctatattcaaagtttacccaagtacttaacattgtgtgaacacaactatgcgcgtgcactaaaattattgccacgtgagcgtttggtagggcaggagcgaaaagttcagttaggtcagagcacttttgtgataaaagtggacgatacggctaaatacaccaccgatatctctattaatcaagaaactggacaattgagttcattacagcctctatatctaacggtccgtatgtatcatgatgcgaaagtggctgaaatcattcatcatgattttcatcaacgtatcaagccctcatacgcgtacccgaatccgagtatgcaccaaaaagatgaaaagtatcagcttaatgcctttttgtatgactggttggttgcctgtgttgaaaatggccgagcggttttaaattgggatgtaaataatggcttggtttagtgaccgctatcattttgataaaacagcactgaaagtcgcccatataactgattgtcatctatttaaagaacctaatggtgactacttttctgtgaatacggctgcgtattttgcgcgctgtttacatgccattgctgagctagatgctgattgtgtggtgtttggtggcgacttaacacaagatcacagcagcgagtcttatcaactttttgctaaattaattacagattcagcgctcagctgcccggtattttggttgcctggcaatcatgatgaactcgctgaatatgaaaagcttacaagcccgcaaattttaaacagtaaacgcattacgtttttaggtgggcaactgcttttagcaaactcaaaaggtccgacgccagcaggttgggtaactcacacgcatttgaatgaattaagccaagcaatagggcaagttccaagcgtggtgttttgtcatcataatccgttgccaattcaagcttatctagataaacatatgctagaaaatggcccacagtttttaaacatgtgtgttaatagtgagcagtgtattggtgtgtttcatggtcatgtgcatcatgaatacacgcaaacttaccgtgatcttagcgtgtttgctacaccagccagctcgatacaatttaccaagcacactatggcatggcagcaagacgatttaggccccgcatttcgtatcattaacttaaatgttgatgcacaacaaaaattgcagttaagcacggatgtagtatggctaaacgggtaatttatattcatggctttaatagttctgagcaatcttacaaagccgtgcgctttggtgaacatatggcgcaattcgatgttgattatcaggtgccgcgattaacccatgagccattacatgcaattatacaattagaacaattgctaaatgatgatactgtattactaggtagttcattaggcggtttttatgcgacctatttgtcgcaacgttattcgatacctgcggtggtgattaaccctgcggttcgcccatttgagttactcgataactatttagggccaaattataacccgtatcaagatagtcattacgaacttggtactcgtcacatggatgcattgcgcagtttatatttgccgcaattagacactccttcattgctttatttgctacagcaaacgggcgatgaagtactgccttttcagcaggcggttaactattattctcagtgtaagcaacacgttgaatttggaggcgatcatagttttatcggcttcgaacaaacctttgcaagtattgtagattttcttaaaatcacgtaaaacatagctaagcgcataaaagatataaaaactatgagtcagcaaaattataacgccgaagcaattgaagtcttaaacgggttagagcccgtaaaacgccgcccaggtatgtataccgacacggttcgtcctaaccacttaggtcaagaggttatcgataacagtgtcgacgaagcaatggcaggtcatgcaacaaaaattgatgttattcttcatgaagataactcacttgaagttattgatgatggtcgtggtatgccaattgatattcacccagaagaaggtattccgggtgtggaacttatttttaccaagctacatgccggtggtaagttctcaaataaaaactatcagttttcgggtggtttacacggggtaggtatttcggttgtaaatgcgctatcgactcgtgttgaagtaaccgtgcgccgtgatgcacagcaatttcgtatggcttttgagaacggtgacaaggttgaagaccttaacgtcattggtacagtgggtaagcgtaatacaggtacaactgtgcgtttttggcctgatgccagctattttgactcagctaacttctctattactaagcttaatcatttgctaaaagccaaagcagtattatgcccaggcctgcgtattaagtttaccaataagcaaaccaaagaaagccaagagtggtattacgaaacaggtttaaaagattacttaaatgaagctgttaaaggttttgaagtactgccaaaagacccatttataggtgagttttctagctctacagaaggcgctgattgggctgtggtttggttacctgaaggcggtgagtcaatcgctgaaagttatgtaaacttaatccctacagcccaaggcggtacacacgtcaatggcttacgccaaggcttacttgaagcaatgcgtgaattctgtgaattcagaaacctattaccgcgtggcgtaaagctaacgccagatgatatctgggagcgctgtagctatgtgttgtcggtaaaaatgcaagacccacagttcgctggtcaaaccaaagaaaagctatcttcacgttcatgtgcagcgtttgtttctggtgtagtaaaagattcatttagcttatggctaaacgagcacacagaaacggcagaattattagctgagctatgtatctcaaatgcacagcgccgtttacgtgccgccaaaaaagttgtgcgtaagcgcattacttctggccctgcattaccaggtaaattaaccgattgtagcgcgcaagataatgaccgcactgaactgtttttagtagagggtgactctgcgggtggttcagcaaaacaagcgcgtgaccgtgaattccaagcaatcatgccactgcgcggtaaaatcttaaatacctgggaagtggagtcgggtcagattttagcgtcgcaagaggtgcatgatatctctgtggcactaggtatagacccagattcgagtgatttatctggtttgcgttataacaaaatttgtatcttggccgatgctgactcggatggattacacattgcgactctattgtgtgctttgttcgtgcgtcatttccctgcacttattaaagaaggtcacgtgtatgtagcaatgccgccattattccgtatcgacattggtaaagaggtgtactatgcccttgatgaagatgaaaagaacggcattttagcgcgcattgaggccgagaagaaacgtggtaaggtcaatgttcaacgctttaaagggttgggtgaaatgaacccactacaattacgtgaaaccactatggatccaaatacgcgtcgtctagtgcaattaacgctggacgaagaggagcaaacgatggagatgatggatatgttacttgcaaagaaacgttcatcagaccgtcgccagtggttggaagatcacggtaaccgcgcacaagtttagttaaggtagttgaacgaatgaaagggcaagaaaaatgaaaaaaatactgacctcattattatcgctgagcttgttgtcagcgccggtaatggccaaagatattcttgataaactcactgtagctgatggatttactatcagcttgtttgctgatgacgttgaaaatgcgcgtcagattgccgtgtcaaaaagaggcatcgtgtatgctggttcacgaaaagcgggcaatgtatatgcattaatagaccataatagtgatggcgttgccgatagaaaaatggttatcgccacaggccttgaaatgccttcgggattagctgttaaagatggtgatttatatgtggcagaagtgtcgcgtatcatccgttttaaagatatcgataaaaacctaaaagaccctaaatttgaagtcgtttacgataaattcccaaccgatcgtcatcatggctggaagttcattagctttgcgccaaccggtgagctaattgtgcctgtgggtgtgccatgtaacatttgtgcggaagacgacaaatatggtcgtattttttcgttagatgtagatacaaaagaaattaaaacaatcgccaaaggcgttcgtaactcagttggttttgattatcacccaactaccaatgcattttggtttagtgataatggccgtgacatgatgggtgatgatatgcctccttgcgaaatcaaccgtgtaggtgaaggtgaagaaggggcacattatggtttcccttatgtacatgcaggcgccattttagatcctgagtttggtcaaggtaagagcattgctgattacaagtcacctgcgcttgcacttggtgcgcacgtggcacctcttggtattcatttttataacggcaaacagttccctgccaaatacaaagagcaactatttgttgctgagcatggctcttggaaccgcagtaaaaaatcgggttacagagtgatgttagcgaacgttgaacaaggtcgtattacccaatacactccgttcgttacagggtttatgcaaaatgaagaaacatttggtcgcccagttgcctttgcagaacttgcagatggcagcttattgatctcagacgactttgctaacgtgatttatcgtgttagcgcaaagaaaaaataggtaagcgttaatgagtgatactgataccttgctgatgcagggcatagaacaacaaacaatggggcgttttactgaagacgcctacttaaactactcaatgtacgtcattatggaccgcgccttaccgcatgtgggtgatggtctaaagcctgtacagcgtcgtatcatttatgcaatgagcgagcttgggttatcggcgcaagctaagtataaaaaatctgcgcgtactgttggtgatgtacttggtaaataccatccccatggtgatagtgcttgttatgaagccatggtgttgatggcccagccgttttcttaccgttacccgctggtggacggccaaggtaactggggggccgcggacgatcctaagtcatttgcggcgatgcgttataccgaagcgcgtttatctaagttctctgaagttttattaaaagagctcggccaaggtactgttgattggaccgcaaactttgatggcacactcgatgagccaatggtattgccagcgcgcttaccgcacattttgctaaatggtgtgactggtatcgcggttggtatggcaacggatattccaccacacaacgtgcgtgaagtagccagtgcctgttgtttactgcttgataaaccaaaagctgaaatcgaagagctgcttgagttagttcatgcccctgactacccaacagaagctgaaatcatcacaccgaaagacgatattcgtaagatttatcaaaccggacgtggttctatcaagatgcgtgcaatttacactgaagagcacggtgatattgtaattacagcgctacctcatcagtgttcaggtgcaaaagtactagagcaaatagctgcacaaatgaacgctaaaaagttaccgatggttgccgatttacgtgacgaatcagatcacgaaaatccaacccgtattgtgattgtaccgcgttcgaaccgcatcaaggctgagccactaatggcacacctgtttgcaaccaccgatttagaaaagaactaccgcgtaaacttaaacatgcttggccttgatggtcgtccgcaagttaaagacttacgtagtatcttaactgagtggttaacgttccgtcgtgaaactgttcgtcgccgtttacaataccgcttagataaagtgttagcacgcttgcatattttagaaggtttattaactgcctttttaaatatcgacgaagtcatcgaaattattcgcactgaagataaaccaaagcccgtattaatggagcgctttggtattaccgatattcaagccgaagcgattttagaattaaaactacgtcatttagcaaaacttgaagaatttaagattaaaggtgagcaagatgagcttgcgcttgagcgtgacaagttagagcaaattctgggttctgagcgtcgtatgtcgacgttgatgaaaaaagaaatccaagaagccgctgaaatgtacggtgatgatcgccgctcaccagtcgttgaacgtgtagaagcaaaagcactaagcgaaaaagatcttattccttctgagtcagttacagttgtgctatctgaaaaaggctgggcacgcgttggtaaaggccatgatttagatgttgaagggctaagttataagtctggcgacagctataaagcctcggcgcgaggtaagagtaatcagccagcagtgttcttagactcaagtggtcgcgcttttgctaccgatgcgcacagtttaccttcagctcgtagtcaaggtgaaccaatgacagggcgctttaacctaagttctggtgccaactttgagcatgtggtgatggcagaagacaaccaagtgttgttaatggcttcagatgcaggttatggctttattagtgactttaaagatttagtgagtaagaacaaaaacggtaaagcgctggttagtgttcctaaaggcggtgaattactcgcgccaattagagtgactgatgtagcgacagactactgtatggcaatttctaacgaaggccgaatgttgttattcccactgcgtgacttacctaagttaagtaaaggtaaagggaataagattatttctatcccaagtgcgaaagtacaagctcgtgaagagtttgtaaaagtacttgctgtggtgccagagggcagtagcgtaaccctgcatgcaggtaaacgaaaactgacactgaaaccgtctgatcttgagcattatcatggtgaacggggtagacgaggtaacaaattaccacgcggtctacagcgggttgatgaagctgtggttgaaatgactcaaactgatgatagtgatgagtcgccaagtgaagtaatagagtaaaatacaaggcctgcaattgcaggcctttttgttgctttagtttgcaacgactctcattgaagccggcctagaaaagttaaggtattgaccgttatcggcttttacattttgcaaatcttgatggctggtattttcagtgaacgtagctgtatggcgataagatagattcggccaatcagaaagagtcactgctactcctggcgctgctttaacgtatacaggatgtttattgatataagcaggtagcctgtagtttgagcgttcatttgcttttaagcagtattcactttgatctagcaagcttacaatgcaacctaaaggctcctcagagctaaatactcgcatagaacgcggcttagaaaaatctaagtactggccatttcttgctaaaacacttttcagtttgttattttcaacagtgccattgaaagtggcaatacggttataagacaagtttccatagtcagataacatgacctgtaaaccttgtggtgctctcacataaacaggctttcgacttacaaaagcgggaagagagcttgctttttgtccatcctctagacaaaactcttcgtttgtttctatgtttacaatacaggcttttggcttctcttgagtagtgataactgaggctggtaagttttgttttgcaggttctagctcttgccataccagtaggtttgagtcgcagtacacagaagcgctagttggtactgaagctgcctctagattgatgtggatcttattcattttacctgttgttaatcgtgttgcaggtaggttgaaggttttattccctgctttttgggttttgacaattaacttacagcttgatgaagagaagctgtctttatagacggcgcctgaagcaccgtgaagtgcagggtaaataaagctttgtagctgttgttcaggatcgtaaaaaccgataatagttgtgattggaacatcttgcttataaggagtgcgattaaccaagcgcagtgtattggtatctaagactgtattgttccaaggttgcattgattgagtcagcggatcccatttactaaacccagttttgctgctgctatcaaaatgtgctttgttttctaaaaagcgttgtatatgttgcaactcgtaaggagtatgtagcgtgtatttgttgtactcgctgtacattggcccaccaccagacatagagcctgtaccatattgatgaccattaaatgcagcaatacaggtctgtttataacagcggtctttatacgataacttaggtgaaaagtttggtataaatttatctaagtcgccatcccaaccccaagttgaattgcgttcatcggcggggcgatttaatactccattttcgccgccagggtaatggcctaaaccgaagttatgtcctaactcgtgactaaattcattaccaacagatttatacagtgtcaccatgcccgcaccacctgataaaccgtgaacaaagataccattatcgtacttaccaatagcattatgggcggttacttgtgctgcactatacgggtgtgctgtcggaccaccgataccagacgcattgataccataattagcattattgataccatgcgacagcagatttttagcaattaaatggcgcatatcaccagagtaaattccccctttacttggatctgaatcagtcaacaggcggccgtcaggcatcatcacttcggttaaatgcagcggttcaaaattatttacagatagcttagtaatagggacttgctgaaagtactggcgatgtaaatcagcatcgtgttgaaaagtgaacttgtctcgataaggagtaagcaagcctacatcaatagtattaattataagacttgtgcttgcaccaactttgacgttatttagtttacttgacttatcgcctagctcaaacgcaaagtgaatgttcggctgaataactgatgccggcagaatgctcgaaaaagtgttatcagaatagttaacagaattatcatcataaccaaagggtttagtaaaggcatcaggcgagcgcataaacgtttgatacatgagggtatcgttgctatcaagcacacttaagataatttgagagtcatttgctaattcttgatgtggcttgaacatcagcatggtttttctttgcgctactaaatgaggttgaatatcgtcttcgatcttatttagagaaggcgttattgaattttgagcaaaaagtacggttgcaggaaagtttccttcggtatcactattaagggcattttggttaaagtagtgagtttctgtgttatttgccacactgtagttacttagcgttaatgcgcacagtacagctagagataaagatgtgtttttcataaacgttcaaccaattgcgtcataagtaggaataatgctatcgaaaatactatcattcataggcctagcaccttttaagatgcttcataaatgaacaagagaaaactctgaacacggttaccaattggctatttcagatagccgtaatggtaatgccagtaagcgattttgtaataatttttagcttacatgtgttcgcttaatactatggaaatgcaattaatcacggtataatgcgcgctgattagtacgaggagaattcgtttgttagctgtttttcgcattattttcatggctttatttatagtttttagctgccttgttggtttgcttttatgtattgtgaagccgtttcatgccaataacgttcacattatctctgggtggttttgcaaagttgctaaagtattgggtgtaaagcttgagcttaagtaccacgaagatcctaaaaatattggtcctgcagtgtatgtagccaaccatcaaaataattatgatttatttactttgccagcgatggtgcctgagaactgtgtaagccttggtaaaaaaagtcttaagtggatcccattttttggccagctttattggctatcaggcaatatattaattgaccgagctaatcgctcaaaagcagctggtacaatttctaaatcagccgaaaaaattaagcgtaaagggttatcggtatggatgttccctgaggggacgcgtagctatggccgaggtttattgccttttaaaactggtgcttttcatactgctatgagtgccgatgtgccagtagtgcctgtttgtatgagtacaacgcataaaactattaagctaaatcgctgggataatggtacaatttatctcgaaatgttagcgccaatctatcttgataaagacgtatctgctcgtgatcatgcatcccatgttcatcaggttatggctgctaaaataactgaattagatgctcaagtgagaaataaataatggaaaattggcgcgaaattactgaagacatcgtaacttcattacttgaagatggctcagatcctgaagtactttatgaagtggaacaccactttgttagcgaaaattttgaaaagttagagcaagcagctttagccgcttttaaactaggttatgatgttgaagaacctgctgaacttgagctagaagacggcgagaaagtgtggagctttgatgtggttgttgagtgtgaacttgacgtagaagcgattatggaagacgtagacaagctagaagcgcttgctcagcaaactgatgttgaatacgacggctggggcacttactttcaggagtaaacagctatcagctgtcagctctcagattgaaacttaatagtttgtgagcttctaggggaaagagtaaagttagcgagttgctactttctaactttcccttttttaactttcctcttttcaactttctaacccatacctatttcgtattctaagaataatatatagacatttttgattaattggtgataattaaaaactcaatctttttatacaccaagcgcgtttatgcttataactttacccattgccgaactagtaccagggatgtttgttgacagtgtcagtaagcagcaagagcacgtaaatagcataaaaattaagacgcgtggcctggtccgcgataaaaccattattcagcgcttaatatctgaaggtgttgaagagcttcttatcgacttcacccaaagtgatgttgcacttcctaaaaaatatcaaccaaaacctgagactactcaagccaaagtagaacaaaagcctgcggctaacgaagtaccgcaagggatcactgttcagcaagagtttctaaaagccagtgtgcattacgaacaacatagtcgaaaactgcaaggcttttactctgatattacctcgggtttaaaaatgaatgtgtcggtacttgatgatatcgccgttgatatagtcagctcggtatttcgtaatcacaatgcgttgactatcttaactcggctcagagataaacatatttataattggcgacatatgatcaacaccgccattttggttagtgtgtttgccaagtacttaggctataaagaaaaaaccattaaagaattagcaatgggtgcattgctgcatgatattgggcaagccaagatgccacagggggttctttctaagccaagcgcattaaataataatgaaatgcaggtagtaaaaaaacatgtggcacaaagtttaggtttagtgaaaggtgaaaaaggcattacgcccttaatgttagagatgatagttaatcatcatgaacgtttagatggcagcggttatcctcggggcatcaccggagaaaagttaagccgaccagcgcgcattatggctattgttgatgtgtatgatgcaatgacggcggacagacctcaccaaatgggtgaagaacccatttcggcactgcgctatttacttgctaacaaacagatgtttgattcagagttggtgcaacgctttattaaatgcttaggtgtacatcctgttggcacgattgtgaagttaaacaatgagcgtttggcgctggtaatggaaggaaatcatcaaaatccaattaagcctaaagttaaaatattttataacgcgaaacacaagcaccacattactgcgaaagatgttaatttgaatgaagagcaagatcttaagattgttgcaagtataaaaccgctagattatcagcttaatttggctcgtttgttaaaagagcatctgcttgtttagacttaacgcagcgttttctagcgctgcgttttgctgatataaatgcaccactaaaacaactcgtcattaaaaccaaccacaacaacgtccctttttcgacatgcaaggcgatgcagcataacatgagtgacaataccgcactaaacatcgcttttaaccaaaagtgattcacagggttatcgcaatcacctgctttagtacacgcacagtagttagctttacaaaaataatgaacactcacaccgcataacatcagcgcaacaacaataagtgcgatttccatggcccgatcctaactgaaaaacctttatttaagtctaaagggacaacaaatacatgtcaatgcaaatgataactattgttgtttgtaaggtttgtaaccagagctctgatgagttttaataagttgttatcttgttgttaaaatgcgggttttttacctatttctaacgaaaaattacagttttttgatcttaattaaggtaatgttcgaaagtttgtaatcattagaataaaacatctaataccaacatacagcgctaatcttttatgcttaactaataggttgccctcattgttggattagttttcgcacaagtttgcaagaggacacagatttatgaagttcactaaaacactaattgcagcatcacttgctgttgtttctgctgacagctttgctgcagctttccaattagcagagcaaaacgtatcaggtttaggtcgtgcatacgctggtgaagcagccgtagctgatgacgcatcagttgttgctcgtaaccctgcacttatgtctttattcaaagacaagcaaatctcagtagcaggtattgctgtaattccagatgtaagcttaaaaggcgaaagtgctgcatacggcttagatgaaagctctatcgatgacgatagcatcgcaccatctgcatttatccctgcaggttacttcacaatgcctttaaacgataaagtgtctttaggctttggtgctttttcaaactttggtctttctactgaatttaatgatgactacgctgcgggctctattgcaggtgaaactgaaatcgttactgtaaatatgaatgcaagcgcttcatacaaaatcaacgaacagttcagcctaggtcttggtttaaactatgtttatgcagatgcgaaagtgattcgtaatgcaggtactaacccatttggtttaccagctagcacacaaatcgctcaccttgaaggagacgactacggctttggttggaacgttggtgtaatgtatcaactagatgagaatagccgttttggttttaactaccgcagcgaaacagatatcgattttgaaggtgagtactcaaaccaacttccagctgctgttggcggtttagcgggcactgtagtacctggtgagttaaaactaacactaccagcaattgctgagttttcaggttcacatcaagtcgataagaagctaggcgtacactacagcattttatggacaggttgggacagcttccaaaaattagaagcatatacaccaagccttgaaacgcctgtattctctaaagaagagaacttctctgattcaatgcgttactctatcggtactgactaccagtacagcgatgcattattacttcgtgcaggtattgcatacgacgaatcaccagctgataaatcacatttatcaatctctatccctgatacagatcgtttctggttctcgtttggtggtaactacgcattcagcgaaaactcaaatgttgacttaggtgtaagtatccttcgtggtaaaacacaaaacttctctgaaaaagacagcctagcagcttctttaggccaaaatgtttcatgggaatatgaatcaaaaggtcacgcagtactagttggtgctcagtataactacacgttttaatactggcgcgacgtaaagttgcgctacagagcattaaaaagccgcgctataacaatgttatagcgcggcttttttgtaagcgcgaataaatcgcgcttgatatatgctgttatagactttcgattttcgctttttgcgctaatagtttgtctttcgcatctgtaaattcagccagtttagcatgctctttagcaagcacagcttctggtgcattatttacgaacttctcgttagctaacttgttttgaacctgtgctaagcctttttctgctttttcaagctgcttcgcgatacgggctaattcagcttcaacatcgattaggccagccattgggatcatgatctcaaggttgccaacatatgatgttgcacatgcaggtgcttcgtctttgttatcaagaagcgtgaactcttcaagcttagcaagagacgctaagaatgcttcgttatccgttaagcggcgcttgtcttcgtcagacgcattagcaagcaataccgataatggcttgcttgggctgatatccatttcaccacggatgttacgaatagcaagaatgaattgcttaacccactcaaggtcagccattgcttggctatcaacatttgcttcattgtaaacagggaaaccttgaaccatgatgctagtgcccgcagtttcaatgcctgcaagtggtgcaacacgttgccaaatcgtttctgtgatgtaaggcattaacgggtgcattaagcgtagtaggctttctaataccgtgatcaaagtatgacgagtaccacgttgctgtgcttcgttacctttaaacaatactggtttagtcagttctaggtaccagtcacagaattggttccaagtgaactcataaatggtgtttgctgctaggtcaaaacggtagttttctagatgttcagtataggttttaacagttgcttcaaattggcctaaaatccaacgatcagcaagtgagtactgtttttcagcatctttagcgaaaccacaatcttgctcttctgtattcattaatacgtaacggctcgcgttccatagtttgttacagaagttacggtaaccttcaagacggttcatatcccagttgatatcacgacccgttgaagccattgcagcaagggtgaaacgcagtgcgtctgtaccgtgtgcttcaatcccgttttcgaatgttttacgagtgttcttctcaatcttcttcgctagttgtggctgcatcatattaccagtgcgcttttcaactaggctttcaagatcgataccgtcaatcatgtcgataggatcaagtacgttacctttcgatttagacatcttatcgccgttttcatcgcggataaggccagttacgtaaacggttttaaatggtacttgtggcttgccgtcttcatctttgatgaagtgcatggtcatcatgatcatacgagcaacccagaagaagatgatgtcgaaacctgttaccaatacgtcagacgggtggaaagtttttaaatcatcagtgtttgcaggccagccttgcgttgagaaagtccaaagcgcagatgagaaccaagtatctaaaacgtcttcgtcttgcttaagtgcaacatcatcagcaaggttgttatcgcggcgtacttcagcttcgtcacgaccaacatatacgttaccttcgttgtcgtaccaagcagggatgcggtgaccccaccaaagctgacgtgaaatacaccaatcttgtacgtcgttcatccacgagaagtacatgttctcgtattgctgaggtacaaatttaatatcgccatttttaaccgcttcttttgctggttcagctagaggtgctacgcgcacgtaccactggtcagtaagaagtggctcaatcactacgccagaacgatcaccgtaagggactgttaagctgtgatcttcaattttttctagtaggccaagttcttcaaattcgctcacaatcgctttacgtgcatcaaagcggtcaaggccatgtagacgctcaggaattggcgcatctaattcaagctctttaccgtcgaatgtgtagctttcgccttcgcttaatatcgcagcatctttattgaagatgttgatcataggaagctggtgacgtttacccacttcattatcgttaaaatcgtgggcaggggtgatttttacacaaccagtgcctttttccatgtctgcatgctcatcggcaacaattggaatacgacggtttacgataggtagtaaaatttctttaccgatcagatcttggtaacgctcatcgtcagggttaaccgcaacacctgaatcacctagcattgtttcaggacgcgttgtggcaacaacgatatagtctttaccgtcttgtgttgttacgccatcagcaagtgggtaacgtaagttccacatgtgaccttgtttgtctttgttctcaacttcaagatcagaaatagcggtgtgtagtttagggtcccagtttactaggcgcttaccacggtagattagatcttctttgtgaagacgtacgaatacttctttaaccgcctcagaaagaccttcgtccatagtgaaacgctcacggtcccaatctacagaagcacctaaacgacgtaattgtttagtgatagtgccgccagagtgatttttccactcccagattttttcgataaatgcatcacggcctaggtcgtggcgtgttttaccttcttcagcagcaagcttacgctcaacaagcatttgtgttgcgatacccgcgtggtcagtacctacttgccataatgtattattgccttgcatacgctttaaacgcgttagcgtatccatgatggtgtcttggaacgcgtggcccatgtgtaagctacccgtgacgtttggtggcgggatcataattgagtatgcgtcaccttggccagacggtttaaagtagccattttcttcccagtcttggtataaagactgttcaatatcttgcggattataggttttatccattacacagaaccttaaataaatgcttaaatgtcaatttcttgcgttgcaatatgagcgcccagttggcgaagctttttaaaccgctcacgggcggcttgcttagcgtttggctcaatgggtacaaagtcaaaaacttgctgaaaacggcgaataaaatccggcaggtgttcagctaagttgattaatatttttctgttgccgacgggtggagtcataccaatttcaaccggtgcgccacctttagggccttcaccttgtaggttgtgtggtacaaaactatctggttcaaatgaccaaatgatgtcgtcgattgtgtgggccatgtcagtgttatcggcgtaaataaatacgcgatgaccaagacgatactgatcagcagcaatttttgccgcgagatcgaaacgtgcgtcagttgattgctgggcattatcatcttgttttagaacgtaaaattgtgcgttcatactcattgtgacgggtgtccccacagatacacagatcaaagcagggattttgacatagaacgcgtattgcttcaattaataaggcgccatttggcgccttatttagctatgtttagcttgttagtcatgattggcttcgtttacgcctgcacggttaagtaaatattgtgtcagcattgggaccggacggcctgtagcgcctttatttttaccgccactacgccacgctgtgcctgcaatatctaaatgagcccaattatattttttggtaaatttagacaagaagcacgctgcagtaattgtacctgctgcacggccacctaagttggtgaaatcagcaaatgggctttcaagttgctcttggtagtcatcccacagtggcaattgccatgcgcggtcaccactttgttcagacgctttaagtaaatcatgagcaagtgggttatggtttgatagtaaacccgtagcatgagagcccaacgcaataatacacgcaccagttagtgtcgctacgtcgacaacagtatctggttcaaaacgctcaacatacgttaatgcatcacacaatactaaccggccttctgcatcggtatttaacacttcaacagtttgacctgacatggttgttaaaatatcacccgggcgataagcgtttgagccaggcatattttcacatccggcaagtacaccaaccacattaataggtaactgcatttgtaccaaggcgcgcatagcaccaataacacctgcagcaccacccatgtcgtacttcatttcatccatggcttcgcctggcttgattgaaataccacctgagtcaaaggtcaaacctttaccaaccaagacgattggcgcttgatctttgtcgccaccttgatagttgatcacagacattactgactcattagcactaccacggccaaccgctaggtatgaattcatgcccagctcagccattttttcttcgccaataatttcaacagttacgttatcaaagttttctgcaagctcctttgcttgctcacctaagtaagcagggttacagatgtttggtggcatattggcaacatctttacataacttgctacccgcagcgatggctaaaccatgctcaattgcactttcgccaatcgttagctcgcgacgtgttggtacgttgaaaacaattttacgaagcgggcgacgtggatcgctctttttgcttttaagctgattaaatgtgtataaacagtcttgtgtcgtttcgactgcttggcggactttccagtaggtgtcacgacttttaacatgttgctcagttaaaaagcacacagcttccatcgaaccagtttcgtttagcgtgttaatcgtttttgagatgatttgtttgtattgtttgtcatcaagctcacgctctttaccacaaccaactaacagtacgcgctcgctcagtacattgggaacgtggtgtaataacaatacttgaccaggttttccttcaagatcaccgcggcgaagtaagtttgagatataaccgtcacttattttatctagctgttcaccaatgggcgataaacgacgtggctcataaacgccaactacaatacatgcgctacgttgtttctctggactaccactttttacgctaaattccattgttactcctgatgttgagtctaaataccttcgtaaaataagggtaagaaattcattttgagctgtttcttacattttttagtttataagcactaatgttagtacataaactgtgactctatttatgtgtttttgaactttatcttaatgtgaatatcaatatcacataatagaggccatctgtaccatttaagcaagattatatgttcttgctaggtatgatatttaactttgatggcatataataaagtgagtaaaataactagtttactcaaaattccttactattccagtgaaactcgatgtttaacaggggcgagcattgctaatttttcgttatttgaccactgaagtcttaaagtcgcaggtcgccgtatttttaactttgatgactattttcgtgtctcaaaagtttgttgttattttaggagacgcctctgaaggggggcttcctgctaagcttgtgctttcgatgattgcactaaaactacctcaacttgcttcacttattctgcctttaagtatcttcttgggtattatcttggcgtacagtcgcatttatgctgacagcgaaatgacagttttcagagcatgtggtgtgagtgagtggtacgtggttcgagtgacacttatttcaagcactgctatggccgtattagcaggggcgcttacactctatatcgcgccatgggccagtgagcaagaatatcaattaaaagagcaagctaaagctgacgctggcttgtcggctttacgtgccggacgttttcagcaaaccgggaacgaaaaagcggttgtgtttattcacaatattgaaaatggtggcaaagagcttcacaaagtatttgttgcccagttgccagaccgagagaaaggtgacttagcccgtttagtatatgctgagcgtggggtggtgattgaacaagaaaatggtgagcaacaacttgttttaaacgacggtaaacgttacgaaaccgatggcgaaacagctgcccttaacttaaccgaattcgatggctatagtgtgcaaatccaagatcaagaaattgagcatcagcgccgtaaattagaagctgttccaacatttgatctgtttaaaatgaaaaccactgaagcaattgcgcagtggcaatggcgtttagctattccgctttcaattccattattaactttattagcagtccctttgagtgtggtaaatccgcgccaaggtaaatttgctaaattagtgcctgcaatcagcttatatttagggtatttcatattactgaatgccgctaagtttgctgttgaagatggcaaaattccgccttcaattggcttgtggtggatccatttatcagccttgtttattggtgggttcttgattattaaaggtcgtccgctcggtgcgtggttaaaagcagtagtgactaagcgggagttaagcgcatgatgaaaacactcgactggtatttaggtcgcagcataattcaaacaaccggttttgcgttaatggtattggtgggtattagcaccctaataaagtttattgagcagttaaaatcggttggtcgtggtagctatgatattgcaacagccctcatttacacactgtatagtatgccaggcgatttagttattttctttcctatggctgcgctaattggtggcttaacgggacttggtgcgctggcctcaaacagtgagctggtagtcatgcaagcggcggggatgtcaaggctgcaaattattgtttcagtaatgaaaaccgctatgtttatggctatttgtatgatggcactaggtgagtggggtgcaccagaagcacagctcaaggcaaaagatatccgtaaccaagcgatttatggcggggatgtttttaatgccaaacaaggggtgtgggcaaaagatggtaacaacttcataaatatcgaagatgttgatcaacaaggcatacttcgcggtgtacacatgtatcattttgataagtcactgcaattaacacaaattacgaaagctgaagaagcacttaatcgcaaggatggctggttacttcgcgatgttaataaggtaatgattacacctgaacagatcactaccgagcaacaaggtgaagagttttacagctcccaacttaccgccgaaaagctaggggttgtatctgtaaaacctgaggctttatcgttcactggattatggtcttacttaagctatttgaaacagaatgagcaagatacgagcacctatgaattggcattgtggcgtaagattatgcagcctatatcgatagccgtgatgttattagtggcattatcattcatatttggaccacttcgtaccgtgacaatgggcgcacgcattattatgggcgtgatcacaggtatcacttttcacctaaccaatgagatttttggtcctgtggttatggtgtatcaaattccagccgtggtaggggctgtattgcctagtgttttatttattggctttgctacttacttattgaataaacgggtgtaatgctcgttttaagacacaaaaaaagcgtggttttgagccacgctttttttgtgcttgatttgttgcttaatcaagtgagcgataaatacgtttattttcttctttggttaaggtgataacttctgtttttgcgatgtaatcttgcaaagcgcgcttatttttaaaatcaaccaacaccactagattccctaaacctaatagcgcagtaatcgctctgattgcaccttgatgccaactaattaagcgaccatcgagggtttgcaccttcaaacgccatgcacgcataccaatagtttggccacttttagcccaaaaatagctaaagaaactaatactcaccactaccaataacgcactacgaatcccatacagtaatggcgaattttgaatgaatgccgatacatcttcggcgttgccaatgctaagtacgtctaatgaaattagcccttgaacagctaataaatacagtacagttgtcagcatcgcaaaagcaattacaactaaggtatcgtaaattaaagaggcaaaacggcgccagaaaccggcacgtggaaactcagctgacataaactatctcatccaattaaattgcgcagtagtttagcaaagtacttagcaaacaagaaatacttagcgaagctttagcgcgtcgacaaacaggtctgacctgctatagtaaagaaaataataaaaatgagtacacaactatggctgtttctcaaagtgaaacacatcaggtatttaatcaacctaaaccgcttgaaaattacaacgcctataaggctgacagcgtgcttcagtattggcaaaaccgttttgcagggcaatggggggctgcacatttaacggcgtttggagagcaagtgggcggcacattattgcgtgctgggttcttagcaaataaacacttgccagaactaaatacacacagccgctttggcgatcgcatagaccaagttgattatcatccaagttatcatcagctgatgcagcatgccatagagcaagggcactgcgcattgccttggcaacaaaaaaaggctggtagtcatgttgtaagagcagcgatggcggtgctccacaaccatgctgatccgggctccggctgcccattaaccatgacctttgccagtgtgcctgcaatagccagtcaaaaaaatgtagcggctatgtggctacctaaaatactggcaaatcattacgattcagataataaaccttggtacgaaaaaaagggtgtcaccataggtatggcgatgaccgaaaaacaaggtggctctgatgttagagctaacaccaccaaagccgacgccatcaatgagagtggtgcagggcaattatatgctttaaccggccacaaatggttttgctcagcgcccatgagtgatgcatttttagtactcgctaataccgatgaaaagcaattatcttgctttttagtgccacgctggctcgaaactggcgagaaaaatgccatgtatattcagcgcttaaaaaataagataggtaatcaatcaaatgcgagttctgaaattgaatttagaggtgcgcatggctggttactcggggaaccaggaagaggtattgctacaattattcaaatggttgctctaactcgttacgactgcatgctaggctcaagttcattgatgttacaagcagtaaaagaagcaatatggcatacatctgggcgcagtgtatttgggaaaaatctgcatcaacagccactgatgctcaatgtgctggctgatttagctattgaagcagaagctgcacttgcgatttcaatgcgtattgcccatgcccttgataatcaagatgatagcaatgaagtggcattgatacgcagtgccacggcaatcggtaaatattggatttgtaagcgggcagtgcagcacacttatgaggctatggaatgtattggtggtgtgggttatgttcaagacaacattaccagccgactttataaagaagcaccagttaactctatttgggaaggctctggtaatgtgcagtgccttgatcttttgcgcgtgtttagccgtgaacctgaatcacttgaggtgcttatcaatgagcttgaaaaagcgcgcagtttgcaccctgattttgcgataaaactcgatgaacttaaagaaatactcacagataccgcaaacttcgaaatgcatgctcggcgcataattgaaaggctggcacagctttggcaagcagcaacgctattgcaatttggcgaaccgtttatagcagatgcgtttgtgaaaagccgattaaccggtgtggggtttagtcaatatggttgccttagttgtgatattgattgtcaggccattgtttcgagaatgatgccaaaactctaaagttaacaacttgtttaataattgttcggttgagtagccgctgcgcacaaaaggcttgctgccttacccattctttgtataatgcttggcatagagacaaaagcagtttaaaaagtttttgctctaaagtggtttttctttatcttctcgtgtttagaaggttaaagaaaaatgaagccagtatgatggaattggtagacatgacggattcaaaatccgttgccttcgggcgtggcggttcaagtccgcctactggtaccacttttatgaccccagcagttttgctggggtttttttatgcctgaaaagtagttagcggacttgagcgccatgtggggcaagctatcttcagcaatccagttcgaaaaggtacttttgtgcctaaccaagcaatacctaaccatacacaaaacaatcaaggctaaagctattccttcggggaactttgtctagtgcttgcaattcgttataaagtatccattcagccactattaaagcaacttttgttctatttataagcggtcaagttcgaactatgcttaattattaaataaccccgaaaaatgtgtgcttttttgctcgcaatgtcaccattttagactagtgtccgatggtgtttagaacaatcttataatacaatttgtggtctaagtataagtgaagtcaatcacttagtgcattgaatcggtagggtggcatcgcgtgggtacatacgacttaaaacgtattgttgaaagtatatctaatcttaaaagtgaaaacttttataatgcaatatgcctttccttgtctgaagtacttggtgcctcttatgtttttttagctcaagttgatgagtcaacgttacatgcgacgaccattgctttggctgcgcatgacgaaattgttgaaaacatcagctacgatatccgctgtaccccctgtaacgatgtaaaatgcggcagtatttctagttatagtgctggtgttcagcagctatttccaaacgatcagatgctcgttgacatgggagttgaagcttatgtaggggtacctctacaaagcgtgtctggcaaaactgatactattcttgtcgcgctatttcagcatgaaataaacgacgcgatgcaaatagaatcgtttttctcattatttaccggccttattcaacgtgaaattgagaaagaccgctttattgctaaactcgattttgcaaatcaacttatagaacaaagccacgaagcaatttttatttgcgaccacaatgtacatattacctacgcgaataccgcatttacgaaaatgacgggctactcgttggatgaagttttagggcaaaacccaaaaattttaagctcaaacaaatatgatcctcacttttacaaagcaatgtggcaccaaattaatactgagggtaagtggtccggtgaaatcactaacaagaccaaacaaggtacgctatatacacaatttttatctataaccaaaatgcaaaataatggtgaagattgttatgtggcgtttattcttgatatcactgagaagaaagaagcagaacagaaaatctactttcatgcgaatcatgaccagctcaccggtttaaccaatcgcttttattttaaagagtacttgtgccagcttgtgtcgtcgctgtcttatcaagacgatgtggataccaatttagctgtaatttactttgatatcgacaagttccaagatattaacacggtatacggcttaacatttggtgatagggttttatgtaagttagcagagcgacttgaacgccattttaaagaatgtgctttttcgcgaatagatggcgatagttttgctatcttgcagacctatcagcacacgagtgaacttgaacatgtatgtaaacaggttactacgttattgcttgagcctttttcaattggtggtatcaatcaacaaatatcagttacattgggtattagcagattagagcaaaccagtgatacaacatcgcaacataaaatagaaaaaattgctcgtcgtttaataagacaagcagagctggctacattaaatgcaaagcaagttgcagaagagtacttatttttctgtaaagatatggatattaaggttaaaaagcataacctattagttgagcaattaacgcaagcggttaaaaataacgagttagaggtgtattttcagccgattattgatgttgaaaataacacggttgctaaattcgaaagtttggtgcgttggaataatcaagggcaatgggtatcacctgttgagtttattccgttagctgaagagtctcgagtgattatacctctcggtgaacttgtgttgattaaaacctgtcagcaaataaaagcgttagaagcagaaggttatgaaaactttgtttttaacgtgaatcgctctttatttgagtttactgagtttaaccctgagcgtaatacatggcttgaaatcattaaaaaacagggtgttaaaccatcaaaaatttcatttgagttaactgaaagtgtgctagcgccagaaaatacaaaccatctcgatgtattaaagcagttgaagcaagcagggtgtttaatttcattagatgattttggtaccggttattcgtcccttagttatttgcgccgcttcccggttgatgtacttaagcttgataagtcatttattgatgaagtgcatgttgatttaggtgacgaagcgctggttaaatcgattatccaaatgagtcgggtgttaggtattaaagttgttgctgaaggggttgaagagcgtgagcagctagcggttctaactgaagcgggttgtgattatattcaaggctattacttttctaagccattgccagcaaatgatgtagtgccatttttaacgcaattttctcgagagcagtaggtaattacggtatgattttgatatcaaccagttagcaaagcttgtgatgtcaaaattaaccgcaaagcaaaacataaaggcgattgttactgccattaaggtcgaagagcagtcgcttagaacacgtttccctatactcaaccagcaaaacaccattgcgatggttattttactaatgtcgttaagcgcactgattggcgttgcgacactttattacctagctattatacctgcatggctgtgtatcattctggctgcttttattacctcgatatcccatgagcttgagcatgacctgatccacaagcagtattttagtaatcgcccttatattcataacctaatgatgttaaccgtgtggctaatgcgacccaatacggttaacccttggtatcgcagaaaaattcatttacatcaccataaagtatccggcacctcacaagatttagaagagcgcttagtgggcaatggcattaaatcgccatttttgagagccttggtcattactgatggcctgctaggtttgcttgtgaataccaagcgatttagtaaagaaattagcggttttaagtttttacgcgtgtttaatgcaggctttccgattacaaccgcgtactttgcgattctttatggggtaattgcttattacgctgtgcagtttgtgcagccatttacattgccaacatggggagctgaattactggcgatggcagagtttttaatggtggtacttattgtgcctaatatgattcgttcgagctctcttaacttagtgacatcttccatgcattattatggcggtgtaaataacttgcttgagcaaacgcatgtgatcaccagccgctggtttttaccgtttcagttattttgttttgattttggccgcacgcatacaatccatcattttgtgccgaatcagcccttttacattaggcaattgatcagcaaaaaaatacatcctattatggcccagcatggggtacgttttaatgacttacaaagcttaaaacatgccaatcactacccagtaaaagagcagtcatctcaacaaggagtttaatatgaaggttaccggtcgttgtcattgtggtgaggtaacttaccatgcagaagttgatgaaaataaagtgattaactgtcactgcactgactgccaaattatctcgggtgggccttttcgcacggttgtggtgtctgtgccagatggggttaccttcacaggtgcttcaccaaaagaatatataaaaatcgctgaaagtggtaatcaacgtgcgcaaggattttgtggtaactgtggtacagccttgtatgctacttctgtaggagctggtgagcgtatttatggcttacgaattggcgctgtagagcaagctgatgagcttatccctaaagcccatatttggtatcgttcacataaaccttggctcgataacctaagtgacatgagtgcctttgaaaccgcacctaaataggtgcggtttcatttttattgttgctcgatagtgacatttcggccacttaagtaaccaaataatgcacacagtaggcttgatgcaatacacagccaaagtgctcctgcccagttattaaaatagctatgtaaggaccccgcaataatagggcctgttgcagctagtaaatacccgatgcattgtgccatacctgataatgccgcggcttgcattgagtcatgagttcgcaaacttacaaatgataagcctaagataaaacacgcacctgagcaaaaacctagcgtgatcgaccagagtgtcgcaaaactaggtgcaactaataacccgactgaacaaagcgcaccaagtaacgccaggcttagggttaagatgcgttgatcttttaatttggcaagtagtggaataagcacaatacccggcagtgccgaggaaacttgaaaggcgccttgcaaagcacctgcatgctgagcgctatggccaccttctataagtatactgggtagccaacctagcatgatataagtgaaaaatgagttgaaaccgagcagcaaagtgatttgccaagcaagtgctgagtgccaaattttgctttgtgtgctaccaggtacatgagactgttttggcatggtatgttgcttaagttgcggtaaccacaccactattgccagtacaaccaataagccataacttgcgagtgccaattgccagccaagttctttatattctgccagcggaatgataagtgctgaatagctgccaccaaatatgcccattgctaaaacataactagatgtcatcactgccactttatgtggaaagtctctttttatcaggcttggcaatagcacattaccaatcgcgatacctacgccaatcactgcggtgccaataaatagcacagtggcagaatcaataacacgagatataacccctatgcctattagtacaagagcaataaatagcgatacttcaaggccgcactttttagcaagacttgccgccataggcgaggcaatagcaaacgcgattaaaggtagagtcgtcaacataccggcttgcgatgcatttaacttaaattgttcaatgatctgttcaagtactggtgcaatgccagtgatcggtgctcttaaactggctgcaataagaaaaatgcccagcactaaaacaaggttacgaaataagttttgagatgatgtcacgctgtttagaaatcatagcaagaggtacatttatcataccaaaacactaaacagcgtgggtgaactatgagatagctcaccaataaatgcggttacttaaaactgataacttactgataacatggcattgcgcggtctacccggaaagtagcggtcgccactaaatgtggtgtagtcagcacgctcagcataacgctcgtcggttaaattgttcactcgtgcagtgaccgtaaagttagctgttaattgccacgccgctcttaagttaactagcgagtggccttcgtaactatgcaggttttcaggatcagtaaagtaactgctggtggtatgtagctcaagtccaacacgcgttatgtcgtttgcttgccaaagtagctgtaagtttgcgatgttacgtggtgcagtatcgatgagattgccattaatattaaccccgccaagtaattgatcgtaactgtaagtgtgtttggcgtggctcgctgctaactgcatcgataagcttggtgtaatggcataggccagctcaagctcaacaccgcgatgctgggtttgaccatcattgacgtaataaaagtcactgtcgcggaaaatagtattctctttattcattgcataaatgctaactacataatgcagctgtgcttgttgaccttttaaaccaagctctaggtttttagctatttcggatttaagatctgcgacattctgttcgcgctgtaactgataaagctctgccgcttgcggtgctcgataaccttctgaagcattggcatagataaactgattatcagcatattgatagcttaaaccaagcttaggcgagaagttagtaaagctatttacgccgctttctggtcgagaatagcgacacccgcccattgcgcatgctgtgccgtcgtcttttgtgcgaccagccaacatttggttgtcgtagtcataacgcatacgctcgtagcgaccaccaagactgatgagtaactcatcaagttgccaatcaaggttaacaaatggtgccaatagggtacttgttacttgatagtcataatgtttgccttgtggcacggtggcgactaaaaacgctgagccttgagtggggccgtcttgatattgtaaaaaatcagcatcagtaagctcaccatcaaaaccaacagttaacaggctagaaccggtcaacttatgctgccagcttgattgtaggccaataccttgctgagcattttcttcaaggggagtacccggtaaaaaatgcttaaagaaggtcatgctttggtcgcgaatataaggcgttagggtaaagctgttagcctcattttgtgtccaatttagctttgaccaaacacgcaaagagcgggccttacgaaatgcatcaggatcaaagttagactgtgctatttgctcatccttatagctttcaaagccctcgatgtagccagcagtttgctgatctaaatgggtgtaagtcaggcctgtacttacacttagtttttcgccatcaaaacggtgacgtagcgagagcttttcttgatcaacactttcgtcatcgcgataacccgtatctcgggtgatcgtggcattaatgcctaagccttgcttgccaaagtcacgacccgtacctagtttatagcgggtatagccaaacgaaccgtaatcaaaaccaagttggttgtggtcataggttgtatctggggtgatcacgttgaccacaccatgcactgcgtttgaaccataaagagcagagccggggcctttcagtacttcgatacgttcagccatttcagtgtgggcttcgaataattcattgatgttgcaaaagccagctgcgcgaagtggaataccatcttcagcagtaagtaaaccaccgcaagcaccggcacctgatagcacaggcgaacgtaaagcgggtaaatactcttggccgttaccatgttgaagattagcaccggcaacttgctttagggcttgttcaatatgggttggagcgataagcgccagttgcttttgtgaaatactactaaccacaacaggcagtggatctgccaatacctcgctgcgcgaggcggttgttgtaatatgttctagctcattattagcaatcgcttgctgattaattaatgaggtgctcacaagcactgagagtatcgacaacttcatgaaaagcctttggttaggtacaacaaaaatcaaagggtaactgctttttaggatgggtaaaagctttcgcgattaataactttttacgttgtgtttatgacgctaaaaattcgcactttaaatcagcatgaaaagtactgccctattttcggtaattagcgttgtaaaaagtcaaaatcgagtcataaaattggctatgatgaccaaagaagtttaaagaaatgtaaagattggctttctaatattctgatatgtaaacaattatgtttttaaattgtaacccttcatctatgattcagccacaaacgttaggctttcaatatgagcaaagttgagggtctcaattatgaataaattactaactatctctgttgctgttttgggtctaagctttattccgatggaagcatacgcaaaacatgaccgtgaccatgatagatatgagcgcaaacatgagcgtaaaaagcatcataaacataagaagcatcacaagcatcaccatcatcatgacagatatgatcgccacgataggtatgaccgttatagctaccgtgatttaccacccggtttatacaaaaaagtaggacatggtggtggtttgccaccaggttggtataaacgtcttcaccacggtgacatcctggaccgtgatatttatcgacatgggcgtgtaattaagcgccgtgatcgaaatggtattattgccatcgaaatcgatgaccgcctgattcatttagtacatgatacgcgagagatattatcaatcgttactcgtcatcgttaatcctgtaagaagccgctaatgcggctttttttggttatttcataccttgttcaggaaaacttgctacgcttaaaagtgtatataaaaaaggagtatttgcatgaaagcattattaacgtttgctgtgttgggattaagtctagccacaacaggtgtattggcaaaagataaggacaaagacaaaggaaagagtcttccaccgggtctagagaaaaagctagataacggtggtgatttacctccaggttggcagaaaaaacttcgtaagggcgacattctcgatcgtgatatttaccgccgcggtaaaataattaactcgcgtgatcgcgatggattaatttctattgaggtagacaatactgttgttcgtttagttgaagacactcgcgaaattgtatcaatattgagtcgctagttttgctacaaagctgtatgacttatggattgagtatactgctagctctgctgctggtggtctcaatcctgccattttcatactcccaacattatttaattcgtagttgtgactttgtacgtttgcaagtggtttaccttgcaggaatgtgtttagttgcatcatgttatttaatcagtcgaacggagtcattgctttttattggttttgctctggctagtatcctagttctactactgcaagttggttggatttacccttacacaaggttggctaataaagaagttgcctcgagcaataaagatgataagcacagtattcgtattatgtcggcaaatgtactgatgtcgaacactgaatatgacaaactcataggtttagttaaaacgcaccaacctgacctattcataaccttagagtctgatcaaacttggcaaaataaactgagtagtttagaacaagagtacccatatcgagtgtactgcccaaaagataatcgctatggcatgcacttgtacagcaagtttaaaatcaaacaacagcaagtttgtgagcttatcgaaagcgatatcccctcaattcatattttgtttgaagatgcagatggcgtagaagtacaagggcactttattcatcctgctcctccgagtcccacagaagaagacagttcacgaccccgtgatactgagctgattattttagcgaaagcacttaaaaacaggcagcgaccttgtatcgttgccggtgatctaaatgatgttgcatggtcgcgtagtacccgtttgtttatgcgtatcagtggtttgttagacccacgtaaagggagaggtttttttaatacctttcatgccagttatttctttatacgttggccactagatcacctttttcatagtaatgagtttagtgtgaaacgcattgagcggttggcaaaatatggttctgatcattttgcgcttcttactgagcttgtttataaccctgattctgacaatcaaaaacagcaagagcaaatagataaagaaaaagcggtagatgagttaaaaatgccaacagtgtcaaagcaacaggtaccaatgtttgaagaatgataatgattagttatttaaaagggctccgtagagcccttttttgtgtttagtcgttgaccataatggttttgatattaacaaattctcgtagcccaaagccgccatgttcacggccatagccactgtcttttacaccaccaaatggcaggtttggctgggctagcccatagccgttgatatttaccataccggtatcaaagtggtgctttgcaagctcaatggcagcttgctcgtcttttgagaaaataccgccgccaagaccatagcgcgagtcattagcaatttgcattgcctcatcattatcttttgctctgataagcgatgctacagggccaaataattcatcatcataggcgggcatgcccggtttgatattctcaagtagcgttgggctgtaatagcaccccgagtgttctggaatatagccaccagtaagcacttttgcgccggcttctaccgactcagttacttgttgatgtagtttatcgcgtagatctttacgagccattggacccagcgtggttttttcatcattcggatcgccaagaacgacttgctcaaattgctctttaattaaagctttaaaatcattgtataaggcatcaaccacaataaagcgttttgcggcaacacaggtttggccgttattaattaaacgtccttgagtacatgccgtgatcgctgtgtctaagtctgcatcatcaagcacgacgtaggcatcattactgccaagttccaatacggttttcttgacctgtttacccgcacgctcagcgacctttttaccggtttcgtcactgccagtaaatgtgacaccgcgaatacctttatgctcaatcaattcacttgctgtactgccatcgataagtaggttcttaaagcaatagtctggaaaacctgcttgcgaaaacagttgctcaatcttttcggccatgccaaatacgttacctgcgtgtttaagaaccgtggtattgcccgccataatgttagcgcaagcatagcgaatgacttggtaaagagggaaattccaaggctgaatacctaaaataacaccaattggctgatagctgataattgcacggccattttgcatatcgcggctttcatcagcaagaactgtaggtccttgttcagcagtgtagcgacaaattgcagcacacagctcaacttcttgaaggccttgttgatataacttgcccatttcatcggtcatcaattgagctaattcttgtttattagactcaataacctcagcaagttgattgaggagtgttgcacgttgttcgagtgtggtgttacgccatgataaaaatgcctgatgacacttgtcgacttctgcattggcttcttgcaatgacattaaactataggtttctaggggttgttcattggttggattgattgtagttacagtatcagtcattattacctcctttaaaatgtaatttgtaacctgcaaaggtaataccgacttgcatttgtttttatcttattgttttttaatgttttagttgttttttctttagtgttttatttgctttgatatgtaaaaactgcaataggctgcaaaacttacaaggaatacgtaatgataaattctgtgttaaataccgagctggcaattattcaagcgccgatggcgggggtgcaaaatgccaaattgacagtggctgtatgtgaagctggggggcttggttcgttaccttgcgctatgctttcgactgagcaattaaagtcagagcttgattatattagtcagcatacagacaaaccctataatcttaatttcttttgtcatcatacacctgactatacactggagcagcagactgcttggcataatgtgcttgcaccttattttgaggagtttgctgttgatgcctcacaatttacccgtaacgcttcacgccagcctattaatcagcaggttattgatgtaattgcgccttataagccgccagttgtaagctttcattttggtttgccaagtaaagatattctttttcaaattaaagcgtggggcggggtcgttctttcatccgccacaacccttgatgaagcacattggttacaagcaaacggtgccgatgcagttattgcacaagggattgaggcgggcggccaccgcggccattttttatcaatggatttatcgctgcaaccaaccacagtacaattggtgcgagagtgtgtagagcttgatatacccgttattgctgcgggtggaatttgcacagctgaagatgtagcccagtaccaagcattaggcgttactgcggtgcaggttgggagcgcttacttactgtgtgaagaagctacgacaagcacattacatcgtgaagcattaaaaaaagtttcgccagactcaactgaattgacgactttgttttctggtcgtccggcgcgaggaatacgtaatcgagtgatgcaacagttaggtgcgatgccagagcaagcgccaccttttccttatgcgtcaattgcgatgacggcattgcgctcaaaatcggaagcaaatggcgacagtggctttacaccgctttggtgtggtgagcgctttattgccagagaaggcattaacgctaagcaaattactgaattactaatgcaaggttggcaatcttgagtgatacccagttacttccgctaggtgatagttatcatcagcttgccagtgagtttcgccataagcttgctgggcaatgcataatgaagcgttatgctaaaggtgatgttctattgcaacaaggcaatcaacaagatgtgggttatttgattgtttctggcgtacttgcggcaatacatgcatcagagcagggctcagaaaagtgcaaagagttttattttcaagatgagtttgcactgctctatggcaactggttgaccaaaactaatgcgttttaccagcttaaagtgatacgagatgctgagcttattaaagtacctttggctttacttgatggccctgattggcaagaattaaaacataggttaattactcagcagttattatttaaggaggcaaaagaagcctttttactacttaatacgccagagcaaaggtatcagtatttgctggataataaaccgcattggctttcgcaattgagtttaagtgaggttgctatgtatttagggatctcagctatttctttatcacgaattagagggcgtcttaacttaagttaaggtgtggcaaaacggtgaacattacactgctggtttttcaggagtcgttatgtttattttatcccagtgcttagttgcaatcgccacattactcgatttagcatcttttcaatttaggcaaaggcacgttattttagcctgtttgtttagttcggtattactcacatcagttcactttttgctacttgaaaatttaagtgccgcaagcttaatgctaatagcggcagtgcgctatgcatattgtatttttgctcgtaaaacttgggtgatggttacttttatgttgataagtattaccgctgtgagcctaacttggtataactgggtaagttttattgccttagttgcaactttaattcaaacctacgcgtcgttccaaggcaaagacctatcattaaggcttatgatggttcttggtacactgtgttggataacacataatgcgatcatgttttccccagtcgcagtggtaatggaaacggtatttctattgagtaatttattaggaatatggcgctactacgcttcacctaaggctgtataagtattaaaaggtgttagcacggtatagtaaaatataccgtgcttttatagcaaaataagcttaaagcgtgttggcaatcagcttgagtaaataagtttcgcgctgtatcgataatccctgcttatcactcattgccatagttgtttcattgtgtgctatggcatcaaatatgtttacccatttgggttgcataccgttttgaacttcgtagtgttccatttttggatctgcaaattcatcacttatttcacaaaaataacagtaagattttatatgcacacaatcaaaatcgtctttgtaccaaggcctgatctcttcatataaaccaaggggatgtttaatctttatttgttgcgcgccagtttcttcatgaagctctctgagtagcccttgctcgatagattcaccgtcatcgataccaccgccaggtaagctgtagtcatcataacgggcggtatataaaagtagtacttgttcacctttcaatacaatggctcgtgctgtgttgcgaataaacacactaccatactgttcacttaaacttgggtggagtactttttttaataacttcatgtgccataaaacttcttgtatttaatcaaatacagcttaatttaatatttgagttgttactatagcgtgtaaatgatattagatttatttttttaccccaaaatggaacttattggggtaaaatgtcggaataaataactgcatatgcactctatgtgtagtgttttcttttcagaaaaactttgcgtagaatgatgaaaaaagcttagggaattaatatgttgaatgtacttttggttgatgatgacagtgaatttagtgatgttgtttgtcacatcgttgaattccttgggcataacattaatactgctgccaatcttgccgaagctgagcaatggtttgaaaataatacgtttgaccacgtctttttagattttatgttaccagacggcagtggtttacacttactcgaacacctaaaaaaaataggtcaatctccgcgagttacgcttatttctggtcacccatcagtaaaaggtaaattagccgagatgtgtgaagctaatgtggggcatttggtaaagccgctacaacgcgaagacattgagcgtgttttaaaccctaaaaaagcgtctgataagaaaaagtcagctccttcaattaagcgtcattttggcaccttaatcggtgagtcagaagtgatgaaaaaactctatactatgattgagcgtgtggcagcaacatcagccaatgtgatgttaatgggcgaaagtggtgccggtaaagaggttgttgcgcaggctattcataacgcaaccgagtgcgatggtccactcgtggctaccaactgcggcgcattttcaaaagagctgattggtagcgaacttttcggtcatgaaaaaggcgcgtttacaggtgcgattgcgcgtaaagagggtgtgtttgaacaagctgctggtggtacgttgtttttagatgaagtcaccgaaatgccgattgatatgcagccaaacttattacgtgtgcttgagagcaaaaaagtaacccgagtgggcggtacaaaagagcaagcggtgaattgtagggttatttctgcgaccaaccgtactttaacagatcttgcgcaaaacaatgttattcgtgaagatatttactttcgtttagcggtatttcccattgatattccaccgctacgtgagcgcaaagaagatattccactgcttgcgaatgcctttttagaacaactcaatgaagaaaatggcactgactttaagtggcaagcaagccagttaaaagagcttgaggctcatgattggcctggtaacgtgcgtgagcttcgccatgcaatacatcgcgcttttattatgagcgatcctaaaggtacggcaattgttttacctgagtcattagagtctcctttctcgaaagtaaataaagaaacacaaaacaaccaagtaatggcaggacaaaccattgaagaggtggaaaaagaactgatccacgcgacattggataaagtacaaggaaataaaacaattgctgcccagatgttagggatcagcacaaaaacactctacaaccgtttaaatgcttacggaggcattggcgaatacaaataataaaggatagctatgaataatgacgagtctttacgtaagttagtccatgatgcacgcgcaccattgaatcgtatttcaatgaatgcagagctagttaagcttgtattagaaaatgatatgccaaagcaaaaagcacttgatgcacttgataaaataattgctaactgccaacagtgtagtgagcaattacaattaattagtgatacccacgctagtgagtaacggaaagcaaatgcaaagaaaaaaacagaagggaaaaatcaccattagctgggcgagctttatcgctgtcgtgctgtgtattgtggttgcaaacgctatattagctattaatagtattcgctcactaacagagatccagaacagtctagataataccaactctctaaatacagctattgaacgattacacttgtctgttgttcaagctgagtcagggcagcgaggctatttgcttactgatcgtgaagattacttaatgccatacaatgatgcaattgcctcaatgcaagcacaaataatgctggtgaaaagtcttcattcagaaataccgggacaagctgatcgtatcgcaaggatgatttatttagtcaatgataaagttgctgtgatgaccaaaaccacagatcttgcattggctgataaagatataaaagcccgccaattgttacttacagataaaggacgcgatttatacaaagatatacgcacagccgttgatgaaatccagatgcgggagcttaattttaaaatagagttattttctgagcttttagaaattaagaacgaagcaaagttaacttttgcaattactgctgttacaagtaccttattgctgatcggtatgtttgttttaacacgcattaacgctcgtaatgcagcaaaatatagagctgatctagaagaacagaatgaaaatttagctgtaaaagtagcagagcgtactcaagagctaaccatctattcagatgaattaagccgttctaacagagagttggaagagtttgcctttgtagcaagccacgacttacaagagccgctgagaaaaattcaagcatttagcgaccgtctagaaaaaatgtttaaggatgatctcggcgaaaaaggcattgattatattaaccgtatgaaaaatgcggcgcagcgtatgtctaaccttattaatgacttacttgagttttctcgagttactacgcgtggcaaagactttgtagataccgatttaaataacgttgtaaatgaggtattagatgaccttgagatcgctattaaagagtctgaatcaactgttaatttagagccacttcctcatattcaggctgatccgagccaaatgttgcagctatttttaaatattctttcgaatgccattaaatttagacgcgagaatgtgccgccagtcataaacattaattaccagcgaactcaagagtttagccaagctcataatagcgaggtcgagtgggagatcattactatttcggataacggtattggtttttctgaagagtacctagaaaaaatatttgttccgtttcagcgtttacacgggcgttcacaatataaaggcacaggcattggcctatcggtttgtcgacgaattgtagagcgtcacggtggcgaaatttttgcgagtagtcgcgtaggtgaaggtgcaagctttactattaaattacctgtggaaacatcccttttcacattacaaggagaggcataatgccatttaataaagttaaaccaattaccattttaatggccgatgatgatgaagatgatcgtttattaacacaagatgctctagctgagagccgtgttttaaacgagttatattttgttgaagatggcgtggaactacttgagtaccttgaacgcaaaggtaagtttagcgaaaaagaaagttcaccaaggcctggcttgatcttactagatttaaatatgccacgaatggatggccgtgaggcgttacaagcaatcaagacaaaccctaatttaaaaggcattccggttgtgattttaactacatcaaagcaagaagaagatatggttaaaggttacgatttaggggcggcttcttacattacaaaaccggtcacttttgagggattagttgagctgatgaagacgcttggtaagtattgggttgaatttgtagagctgccaacaccactcaatgattaaaggataatacatgttagataaggtaacccgcttactcttggttgaagacgatgaagatgattatattctcacttgtgattacttggagcaattgggttcccatacctttgatgtagaatggttaagctgccccgagcaagccattagtgtactgagcgaaaacaaacatgatatctgtttgttagattatcgtttaggtgcctctgatggcttagaagtgctcaaacgggctgttgcaaacggttttcgtgggccgattatcatgcttacggggcaatcagatgaagcccttgattctgcggcacttgatgctggtgcggttgattacctcgtaaaaagcgagatgaattcaagccgctttgcccgcgctattcgttacgccttagctcgccgagatgttgaagatgagcgagttgaacgattaaaagcggaagcagaaaatcgttctaaagaccgcttcttggcacatttgagccatgagttacgtacaccgctttcatccattttgggttataccgagctgctaatgcagagcgaaaagaatcggcatttaaataatgaacttggggtcatttatagaaatggcaaacacttgctaagtttacttaatgatgtgctcgacttatctaaaattgccgccgataaacttgaactaaattgcagtgatgttaattttgatagccttatggctgatgtgtataccttaatgcgcgtctcagccttggataaaggcttaaaacttaaatttgagtcacagcaagccttgccattgattataaatacagatgccacacggctaagacaaattttaatcaatattatcaataatgcgattaagtttaccaaccaaggtgaaatagtcgtgcgcgcatggactgcttgggtcaatgagcgagaaatgctgttttttagtatcaaggacacaggccttggtattcctcatgaaaagcaggcactgatttttaaaccctttgaacagattgccgatgttgagtcgagggatgtaggtggtgcaggccttggtcttgcgatttgcgccgaattattagctcgtatgcaaggctcaattgagcttgaatcaaccttaggggaagggtctgaatttatcttatctatataccctggcaatatacgtgaggttgaacgacaggtattgagtttcgattcaagccctgattgtcagcaaaagttaagtacactttcaacttcagggagagtgttggttgttgatgatttaaaagacctacgagttctcgttggacacatgatcaccagcactggggcagatgtagagtttgctgaaaatggtaagcaggctatcgagaaagtggccagtgcagagcaagcaggcaaacctttcgatattgtgtttattgatttacatatgccggttatgggtggtaaagaagccaccattgagcttaggaaaatggactatcaggggcctatcatcgcgcttactgccgcaacaatgaaaggtgtaaaaagtgagcttagtgcgcttggttttaatgacatgatagccaaacctgttgatactggattactttatcaagtgctcaatcattatatttgccaaggtaaaacagaacctgttgttgctcgggaggattccctcgcattgactcagcaaagtacacgttatttattggttgaagatgatggtgatgccgcacaaataacccagctattacttgaaagtttgggggttgaaaccgtcattgccgatagttgtgctgcttgtatggatattcttcacgatgatcaacgctttgataaagtgctgttagacatgcacttgccagacggtgaaggtcttgatttggcagctaaaattaaccaagagtatgcggggttagctttagtggtagtgagtggtgccgagccagatcctgaaaaaatgaaacagcttgatattgaacaagtgctattaaaacctattaatttagggatactcagcgagcttatagcgcactgatagagtgcctaacaataagctctggttcaaataaagtctgtaatgacggggtttgcttttggtaaacctgattcaggatccagttagccgccattctgcccatttcttcaatcgggtagtttatggtactcagttgagggtaaacatggcgagtaaaaaacacattatcgtatcccataatagataactgtttagggagtgtaagccctaattttcttgcacttgccatagcgccaacagccatttcatcgttggcacaaattaaagcactaaatggtttgccatgttgatgcaatgccgcaagcccttcaaagccactcgattccatgaagtcaccttgatatagtaactcttcatcaaaaggaacaccaaactcagcaagcgcttgcttatgaccttctaaacggtctttggcgtcttgcttccataatgggccactaatatatgctatctgcttgtggcctttttctaatacatatttggcagcaaggtaaccgccttttatattgttaagtagtatacaacgatcacttagctgactaatgtagcggttgatcagaacaaatggaatacggcctttactaagtttaattaggtactcatcactaacagcttctacgtgtaaaataagcccatcacaattgcggcttattaaaaactcaataccttgtttttcgcgttcttcatcactatggccagctgcaataatgaggtgtttgccttgatttcgaaaaatgttttcaataccactcatcattgggccataaaatggaccttgtaattcagagaccagtaagccaacactgtttgagcaatttgatgccaacgactgtgcaattgagttggggcgatagcctaactcactcattgcagctgtcacttttttacgagtagcgtcactgacattggcattgttattcattactcttgaaactgtagcaagtgagactcctgcaagtttcgacacctcgtaaatggtggccatgtttgtccttttaaaaaaccaagttattgtttatgttgcgatgataagtctgcactaatctgctcaacagtttgattatcaagaatatacattttcatgataaatgcgacaagcatactacctattgctgggtaaagggtaaatgaaatcaaaatacctgataatgttgtctcgctaagctctgcgttagcctcatagccataaaaagccaatagccagcccgcaattgctccacctagcgccaaccctaacttaatgaaaaacaccacactagcatacactaatcctgttaagcgctcgccagttttccattgcccgtaatcgatggtatcagccattttggcccaaagtagcggggttgccatttgggtgaaaaagcaccaaaagaaatagataacaaatgccaatacaatctgctcgctaggcaaccaaaatgcaatacagctgataacagcagaaatatattgtaagcgtatgtatgctgttttcttgtctactcgcttgcttagagggttagcacatgcacatccaaggatattgcctatcatgccaatggttacaaagtaggtcaccaaatcagcctcgccaagtacatacttaacatagtaaattgctaaggtagtacgcaaaaccatactggtaagtagcattacagcggcaaaacacagtactttaaaaggactattttgccataatgtattgaaacgacttttccaactaagcgacgcattgttgtgtgctgtaactcgttctttagtgtagcgaaaacaaattaaaaatagcaccacacctaagccgctcatcagtgccattgttagctgatagcccgtcgcgttatcacctttacctagccagttaactaggggcaaagtacatgcactcacaattaacccacccagcataccaaagacaaaacggtatgattgaattgatactcgctctttcggatcgctacttaacacgccacctaacgctgaatagggaatattaatagcggtgtagaccagcatcaataaagtgtaagtaacaaacgcataaactactttacctgattcaggtaggtcaggggtggtaaaggtgatcatactgatcaccccaaatggtaaggcaagccaaagcaagtaagggcggtagcttccccacttagtgcgggtcgaatcggttagagcccccattaatggatcggtaatagcatcgacaactctcaccaccaaaaataaggtgccgacaacagcaggcgatataccaaaaatatcagtatagaaaaacgttaagaataacatcactgtttgaaagataatgttacttgctgtatcgcctaatccgtaggctatcttttctttttttgtcagcatgtgtgctctcgtgtgttgttatttttatcgttgtcttaataattcacgatattgttttgcgctttctttcaaaatacgctgctggctatcatagtcaatatacactaacccaaagcgtttctcgtagccatacgcccactcaaagttgtccattaagctccaagcaaagtaaccttgaatattaacgccttgacgaattgctgcacaaactgcatttaaatgagtgtgataataatcgactcgctcaacatcatacacttcaccattgttgagtgtatcagccatagcagccccattctcagttatgtacattttaggcaaatcgtattgctggtgcagtgatacaagcagttcagttaagccttgcggataaacctcccagcccatatcggttacacgtacattggctaaacttgcttcttcaaaccagccatctggggtgtttttgtagtgtatgcgggtataataattaacaccaataaagtcgactgcttggctaataatcgccatgtcgtcagcaagtattgtaggtttaacttcgtctgctaactgatcaaatagcggaggatagcatccgtctagtacggcttttatataccattgattatgatactgatcagcaagctctgcggctttgctatcggcagcagttagcggataagtagggctgaagtttagcacgataccggcttctgtatttgggcagttttcacgtaaaacctgcatagctaggccatgggcaagtaataggtgatgagctgcttgtcggcctgcctgttgtgattttacacctggtgcatgcacacctacttcgtaacctaaataagcactacagaatggctcgtttaaagttgcaaatgagtctacaagatgaccgagatgttcagtaactagctcagtatattctctaaatttgtaagctgtatcacggtttaaccaaccaccttgatcttcaagatactgaggtaaatcccagtgatataaagtgacgtaggttttgatgttgcgcgcttttaaagccgttagcaactcaagataaaaagccataccttgtttgtttgcagtcccatcttgattcatgactcttggccaagaaattgataaacggtaagcatcgacggctaaatcggcaatcatttcgacgtctttttgccagtgagctatgtgttcacaagcgttgtcgccattactttgatctgcaatagcccctggtttttcacaaaatgtgtcccaaatacaatcaagtcgagtgtcgcgggcgccttcgatttgaaatgacgctgtcgctacaccaaaagtgaattctggtttaagcaaaaacgaatcaggcaaaagagaaatagatttatacactgaagagtcatccttcgcattgataatgtaaggctgccaaaggcatatacagtctatctgtaagcgcttacatttttattgtaaataaattgctaattatatttaatatgatataaatgtaagcgcttacatttgatgttgcaacatttttcgctatttgttgttagtagtttagttctggatatgctgtaacaaactgataaatataattaactagagataaaattatggctcatgtatcaacgcctgttgcggcttcagctagccaagctgatatgcctaagcaacactttgcactggcatcattgaccacgttatttttcatgtgggggttcataacgtgtttgaatgatattttaatcccttacttaaaaggtatgttttcgcttaactacacgcaagccatgttggtgcagttttgcttttttggtgcttattttgtgatgtctatccccgcgggtaaattggtcagccgtattggttaccagtttggtattgttgtgggcttggtggttgccgccattggttgtgccttgttttatcctgctgcagtagcacatgtttacgaattatttttactagcattattcgtgcttgcatcgggtattactattttacaagtatctgcaaacccttacgtgagtgtccttggcccacaaaaaacagcgtcatctcgattaacgatgacacaggctttcaactcacttggtactaccgtcgctcctatctttggtggttggctaattttatctgaagtcagtcatgcaaccgcagagcaagtaaagttaccttatttgttactgtcattaagcttattagttcttgccgttatttttgcttttttaaagctgcctaaactaggtagagaaagtgataatgaagctgcacatcaagacttagaagattttgttgacttaggcagtgtgtggaaataccgccatttaattttaggtgcagtaggtatttttgtttatgtgggtgctgaagttgctattggtagttttttagttggttttttaactttagataatattgctggtttagctgaaaaggaagccgctcactatattagttattattttgccggtgcgatggttggccgttttattggcgctgctgtgatgcaaaaatttgatgcgggcaaagtgcttgcgtgtcatggcttacttgctgtggtgttaattgtgatcgcaatgacaggtgaaggcagcctagctatgtgggcgattcttttagttgggctttgtaactcaattatgttcccaactatttttagccttgcgcttcatggcctaggtaaatacacctcaaaaggttctggtattttgtgcttagcgattgttggtggcgcaattattccattattgcaaggtgttatggctgatgctattggcgtgcaactggcgctctttctacctatcgcatgctacttatacattacttattttgcgctagttggctcaaaagtatcaactcagacttcaaaggtgtaaatatgaaattgaaaaatacattcaccctcggctctttaatgattgcaagtatggggccgttaggttgtgctgagcaagaagtaacagttaaagaaaaagtgaaacaagaaatctggccacatattgaaaccgggatcgctgaagaccctgagcttgaagctaagattgcgaagatgttagccggtatgacgcttgagcaaaaaattgcacaaatgatccaacctgaaattcgcgatattaccgttgaagatatgcgtaaatacgggtttggttcttaccttaatggtggtggtgcattccctaataacgacaaacatgccaaggcttctgattggattgatcttgctgaaaaaatgtatcaagcctcaattgatgactcattagatggcagcaaaattccaaccatgtggggcaccgatgcagtacatggtcacaacaatgtgattggcgctacattatttcctcataacattggtttaggggcaacaaataaccctgagctaattgagaaaattgcagctgctacagcacaagaagtaatggtgacgggcattgattgggtgtttgcaccaacagtcgccgttgttcgtgacgatcgttggggccgtacttacgaaggctactctgaagacccagaaatcgttaaagcttattcagcagccatcgtaaaaggcttacaaggagctgttgataaagattttctgtctgataaacgcgtgatcagtactgttaaacactttttaggtgatggcggtacagaagggggcgatgaccaaggtaataacaccgcgtctgaacaagagttattcgaaattcatgcacaaggctatgttggtggtttaggtgcaggtgcacaaaccgtgatggcgtcatttaacagctggaatggcgaaaaaattcacggtagtaaatacctacttactgatgtgctaaaaggtaaaatgggctttgatggctttgtcgtcggcgattggaacggtcacggtcaaattcctggttgtaacaatgcagattgtgcgcaagctgcaaatgcaggtcttgatgtgtatatggttccaacagatgcatggaaaccattatatgaaaacttaattaagcaggttaataacggcgaaattgcgcaaagtcgtattgatgatgcggttacccgtattcttcgtgtaaaaatgcgcgcaggcttatttgataagccaagtcctgctaagcgcccgctttctggtaaaacagagatcattggcagtgcagagcatcgcgcagttgcaaaacaagcggtacgtgaatcactggttcttctgaaaaataaacagcagctgttaccattatcaccaaaagccaatgtactagttgctggtttaggtgcagataatattggtatgcagtcaggtggttggactatcacatggcaggggacaggcaatgaaaatagtgacttccctggtggtacttcaatttttgatggtattaaaaagaccgttgagcaagccggtggccaagttcagtatgatctaaatggtgaatttgaaactaagccagatgtagcgattgtcgtgtttggtgagcagccatatgctgaaggtaatggtgatttagacaaccttgaatatcagcgtggtaataaaacagatctagccctacttaaaaagctaaaagaagcgggtattcctgtggtatcgctatttattagtggtcgcccaatgtgggtgaatgcagagctaaatgccagtgatgcatttgttgcaacttggctgccaggtagtgaaggtgacgccataagcgatgtgctttttaaaaatgcagatggttcaatcaatcatgactttaaaggtaagctgtcattctcatggccaaatgatccaatcggcaatcaaaaccgtggcgataaagattacgcaccacttctgccatacggctttggtttaacatatgaagatgagaatacccttgctgacaatcttgatgaaacttctcaggtgacaagtgaacttgaagatctagtaatgtttgagcgtgcaattaagtcgccttggtcacttcagttgcaaagtggcagtgaaatgcaagcaatgacgagtagtcgagctgctgtaaatgcagtaagtgtaaaaacctttgataaagacgtacaagaagatgctcgtgccattagttttaacggtaaagagcctgcatcagtgcgtttagtggctgcgtttccgtcagatttacgctcgtacgttgagaaaaatggtcaacttgagatgttaattaaagtggataaagcggctgatgctcctctaatgttaggtatgcaatgtggtgaaaactgtgaaggccagtttgatattcgcgagcgactagcagacacggccgaatggcaaactatctctgtaaacttagcttgttttgcagataaaggtgtcaatctagcgcaggtattttcgccttggcagttggcaaccgacggagcatggcaggtgtcgattgctcatttaagcgttggtgtgaccgataatcaagaattgacgaatacttgtaagtaacaactcctcccttacgtccttttggttaacaggtaacatactgcctgttaaccactttctctttatcaagagctttactctgctagatagtttagtactgttgtctttcatcttcagttagaattactcaatgatatacgtgtttgcctaagttttacttaaaaggatctggttatgcattcagtaaaattagcctctgaagaatttacaccgagtaagatagtctgcgttggacgcaattacgccgagcatattgccgagctaaataatgaaactcctaccagcatggtattgtttgtgaaacctaatagtgcaatttcgcaacagctccatgccgagcataatggtgaagctctacattatgaaactgagctttgctttctgataaaaaataaacagttggctggagttggattaggtctcgatttaactaagcgctcgttacaaagcgcattaaaagaaaagggattaccttgggagcgtgcaaaagcctttaatggcgcagcgctatttactgagtttgttagttgtgatgaagctttggcgtatcaatttaatttgcaaatagatggtaaggaagtgcagtttggtgatactcagctaatgctgcatgatgcacagcaaattttatccgaaattagtgagttcatggatttagaagatggtgacatcatcatgaccggcacccctaaaggtgtaggtaaggtaacctcaggcgctatatttaaggtgactttgcaggcggctgagcagactcttttgagccatcagtggcaatcacgttaagcggctctaaaatataacgctgataatgggacgaaaactcaggaaagctttgctctagccaaatgcgttggctaagttgatatttttcatcagccaaaatcttattttttagtacggtgtttatttttgctaaaactttttcggcgtaattgtttggtgcactagatgagcaacctattgcaccgaatatcatatttttttcaggaatatttacggccaatttttgaatattcttttggtttgtctgattgtagtaatcagcaacaaaagggtattcaatggtgtaatcaatatagccatgttcaagctgggaaagcagtgcgtaattagcattactaccagtactacttagcgcagcactctcgtatagctttgtattaattgcaatagtgtctatcaggttaccgaacttacgagcatcattttgaccataaatgaagttggcatcggtcagtaaagaaattaatgagactgggttgccgtgtttttgcgtaatctttactgcggtgtcaggggtacttaaaacactaaatggaggatagaccgtcgttggaatcgagtaggttgcgcgattggtcttttcctcacggtggatcatacaggcataacacgccatatggccttcatcgaggtatttactgcctcttttttgcggcaacatcaccttggtgtgtttaatctctggtaaggcttcaatcaacatatcggtgatttcgttgcacaagccgccatacgggttagcttggcttttctctatatagaatggtttaccatcattttcaagccaagtaattgaaagttgttctgaggcacaagtgattggggtaagcaatataccagtaacaatgcataatacttgttttacgtatttactcatcgataacccaaatactaaagtactgttaacaactatacactaaagtatggataaatttgtagataaaactttaaaatgataaataagtgctagtgagtctactgaaggtagactcactaatgttttagaagatagcttagaatggcatcggatagcggttaaatacgtcagcgattttatcgttagcttcatcgcttaatggcaccgagaaagcatcgatattttcttttaactgcgccatcgatgttgcaccaataatcgttgaactcacaccatctacttgattacaccaagcaagcgcgagctgtgaaggcgttaaattaaaggcgttagcaatttcaacatattcagcaattgcagcttgtgattgtgccgtgtctctaaataggccattacgttgtactagcgtccagcggctaccttctgggcgcgcaccatttaagtacttaccacttaacatgccaccacccagcggtgaccatggtaggtaagcaatatcttcatgaatacattgctcaatcaaatacggccaatctttggcatgcaacaaactaaactcgttttgaattgataccatacgcggaaggttatgttgttcgcttaaacgcaggtactggctaatgccccacggagtatcatcagataaaccacagtgtttaattttacctgcttttacacaatcattcagaccttcgaggatatctaacatgccagcgatattttgctcggtgtcagcctccgagaagcgcactttacctggccactgtttaccaaagtgtggcgaagtacgattaggccaatgtaactggtataaatcgataacatcagtttgtaagcgtttgagtgaagcatcaacagcttcaactactgcctggcgagtaatgtcgcccgcatcgcgtacccaaggcaagccgttacctgcaattttagtggcaataacaaggttatcgcgtttgtctttgttacgagctaaccagttaccgatgatctgttctgttttaccataggtgtcaggagaaggtggcactgcatacatttctgcagtatcgataaagttaacgcctttatctaatgcataggcgatttgttcatcggcatcggcctggttgttttgcataccccatgtcatgctacctaagcaaacacgagatacatcaataccacttcgaccaagtgggctataaagcataatagatccttgttaatcgctagaatgggctttaagtgcagctaataactcatcatttaactgcgcttttttacccgttttaaaattaaacattaccacttgtgatgaaccaatggttgttactgcatcttggctttcactaaatacagtgtaatgcatcataaaacgatcttgttcaatgtcactaatcttaacaccaacatgcaccgtatcaggaaatgttaccgggcgtttatagcgagcattgttttcgctgatcaccgggccaacacctgttacttgtaaatctttaagaaaacctaattgagtaaaaaaatcgatacgggctgtttcgaagtagcgaaaatacactacattgttgacgtgttgcagggcatccatttcaccccatgcaacattgatttttgttctgatagggtgttgttctataaacgattgcatattaaatcttcattgattgtgagataacttaggttagcaatatgcagcttttagctcaaggtaattagaaagctcagtatactgtgctagatttataagttcacgcttacgtaaagtgtgcactggtttaacacacattgaaggatcttaattatgcagcaactcactttgaaagcggctaagtggatcgctcttttcatcctccttgcgctcgctctgctgtgttacagcatgggcacaatgtcaggattcatcgtcttaattggtgtagggttgctacttgaggcggcattctggctgtttggagcacggcttgttagccggaaaaaatcatcacagcaaacaaacgagcaaacaagttaaattacctagcttgcacattcgggtcgtttaaataataataactgtataaataaaagggctatccatttagagcgaccagacactatatatagtgtttatctagctctaatgcctttataggttaggggttttgttgtcacagattgctcaagtaatcgataaaataatagccctctagaccgcgattttcttctgttaaatctaaaggtatattcatctaaatagtagtcgagctgtttagattgaacagcaccttgataggtccctaacaaccaacgctttagtaaagaggctactctgtgaacccctggcatggtttcgtgagcaggtatatttgaaccaagatgtacggtcttttttcttgagtatcccatgctatcaatggaaccataagccgcagatccgtctgtatgaatttgactacctggttcaataacatcgactatgaattgctctatgttgcttttcgtcgctctatctacctgtcgtaatctgatacgaccaaacccttttggctcaattaactctattgcgatcaacacaacaaacttcttcttatcttgttgatttatattaactaagccacctatgaaggtttcatctacctcaataattcctgataacttatctctttcaggattgatcattgcatagcgtaatcgatgcaatatcgaccaagctgtttgatagcttccaagtccaagtaagcgctgtataccaagcgcacttactccatttttttgatttgtaagataccaaatcgcagcaaaccagtctttaagaggtgttctcgttttatcaaaaatagtgcctgccgtgacagacgtttgctttcgacactgagtacatttaagtttatttttagcaaggctataaggtgccttgtgggccaaacaatttgggcatatgaagccattaggccagcgaagcgtgtacagataatcacgacaagcttgctcatcgtggaaccagtcaacaaattgactccaatttttagggtaatcaatacccgccttgagtgaagaagattttttgttcatcactacatattgacattggttgctctaaatagatagcccttataaataaacagttgttgtatgttagatgaaaaaattcattcatattgatatggattgcttttatgcggccgttgaaatgcgtgataacccagcccttgccaatgtgccactggctataggcggaaatagtcgtcgcggggttctttctacagccaattatattgcccgtaaatatggtgtgcgttcggcgatgtcgaactaccacgccaaacaattgtgccccgatctggttatcgtgcccggacgaatgcaggtctataaagaaatttctacacaaattcgcgctatttttgcaaagtacactgaccttattgagccgttatcgttagatgaagcctacctagatgtaaccgacagtaccgcatgcaaaggcagcgcaacactgatggcgcagcaaattcgccaagaaatctataacaccaccgggctgacagcctccgcaggtgttgctccgattaaatttattgccaaaattgccagtgatgaaaacaagccaaatggacagtttgttgtattgccagaggaggttgatgactttttggcgagtttaccgcttggtaaaattcctggtgtaggtaaggtgacattagaaaagttgcaactgaaagggctttacactggggctgatgtacgcgcgaaaggggttaattggatgcagcaacacattggtaattttggcgtgtctttatatcaaaaatgtgcaggtgaatacgttggcaaggtgtcaacagagcgagtacgtaagtcacttagtgttgagcatacctatgaatacaacaaaaataatttagacgaatgtttaagccagttaccccgtttaatggaggaattaactcgccgtcttgataaacaacaattaagtaaccgcatcaataaattatcggtaaaagtaaagtttgccaattttgtcgtgaccagtgccgatcaaagccaccaccaattagacgaacgcattttttctgagttaatgagtaaagcctatgagcgaggtaacaaccagccagtacgcctgttagggataggtgtcggaataaagagtcaagctcacgagcattttcagctgagtatattagactaaaggttaacaccttggtgcttgaaagtttgttagtgtctagttggggtgctaggcctatctagttcaacaccttagacaacattataacttaataagagagatgactatgcaatcggtcgtaatcgtgctgctcggaatagtcggtatgttgttcggatggttcttttattcgaaattcatcgccgaaaaaatatttaaaatggatgataattttgtcacacctgctcatgaacttgaggatggtgtggattatgtgccaaccaacaaagttgtgttatggggtcaccatttcacttctgttgcaggtgcagcgcctattgttggccctgcgattgccgtatattggggctgggtgcctgcggtactttgggtggtatttggtactattttttttgctggtgttcacgacatgggggctctatgggccagtgcgcgtaacaaaggcaaatcaatgggcgctttatctgaaagcgtaattggtaaacgcacccgtgcgttatttatgattgtggtgtttttagtactgctgatggtgaatgcggtatttggtgtggtaattgccaaatcatttgtatctcaacctaacgctgtttttcctgcttggtcagcgattgtcgtggcgttagtcattggtcagttgctacgccgtaaagtgtcgttaattccactttgtttaattggtgtggggatcctttattacactatttaccttggtagtagcatgccaattgcattacctgatgaaatgtttggcttaagtgctaatgcgaactggatcatcatcttatttatttatgcggcaattgcttcattactccctgtatggatgctgttacagccacgtgacttcatcaacggtatgcagctattagtgggattagtactgctttatggtgcggtatttatttcaatgcctgatatcacagcgcctgctttcaatactcaaacggcggttgatacaccaagtattattccattgctatttgtgaccatagcctgtggtgcggtatctggcttccacggtattgtctcttcaggtactagctctaagcagcttaacaaagaaactgatggccgctttgttggttacttaggtgcggtaggcgaaggtatgcttgcgcttattacattggttgcagtaagtggtgttgcgcttgcggtatctccagaagaatggcatgaaatttacagccacttaggtgccggtagtgtgagtgcctttattaatggtggcgctaatctaattgaaaacggctggggtatttcgcaagaagtcgcctcaacattacttgccgtaatggtggtgctgtttgcggggactacgatggactctggcgttcgtctgcagcgttatatcatccaagagtggggcgatatttataatatcagcattattcgaaacggtgtggttgcgacgttagttgctgtactttgctgtttactgcttgcttttggtgctggtggcgctgatggtagcggcggtatgatcatttggccgttattcggctcgactaaccaaatccttgcaagtttaaccttgttggttatttcagtgatgctaattaaggcgaatcgtcctgcaaaatacacactgatcccaatgagttttgtattgataatggcgttctttgctggggttattaaacttggcgagtactatcaacaaggtaactggttactggtgacacttgatttgttagtactggtggtgagcgtactggttatgcttgaagcttggtctgtgattgttaagcatcgtaaagactcagcagacattacagagcagtaaacttagcttgccagccttatcgtaagctatcttacttggctggcaatagcgctttaaatcaatgataataaggtcctatgtttctaacagcaggaccttttttatggcataccctcatgcagttgcagccccgcaattagcggatgcaaatcacgatgcattgattattatcggtgatgatttttcttctttagcagacgcaagcttaagccaagctattagcgctcaacaagccgtagacgcacgtattggtaaacaagtgacattacttgtaattgactctaaacgcgttattttggcgcctacaggccctctgaaccgtgattatgatgatgtacgtcgttactttgatgcggcaaagcaaggtgtactagaagccaaagcatcggggagcactcagcctgctattttacttgctaatataaatcaagacagccgttacaagcatgcccttgaagtggcgtatttaggtgcttgccaagcactgtggcaaccacttgaagcacgtgagttccacggtcaggcgattgaaccaattagccaaattagcctagtgggcgcagatgcagctatggttaaagcagtgaatgccattgctgcgggtcaatacgctgcacgtgacttatgtggtaccgagcctgagcgtatggcaccacctcgttttgcagattattgcgttgagttatttgcaggtagcaaagtgtctgtagaagtgatttcagatatcaacactatcgataaagattacccaatgatgagcacagtagcgcgcgcatcctacgctgtcgagcgtcatcatccgcgtgttgtaaaactagagtatgttcctgaaggcgacgttgagcgcaccctaatgtttgttggtaaaggtttagtttacgataccggtggtgctgaccttaaagtgggtggctttatggctggtatgagccgtgataaaggcggtgctgcttcggttgctggctttatgaaatcagtggctgactttgcaccaaaaggcgtaaaagtaatagcctatttagccgtggttcgtaactcaattggttctgattgttttgttcctgatgaaatcattaccagccgtgaaggtgttcgtgttcgtatcggtaacacagatgctgaaggtcgtttagcaatgggtgacctattaagcgaaatgaaagatcgtgctttaaacgaagtaaatccagagctattcactgttgcaacactaacaggccacgcagcacgtgctatgggtccttacagtgcgtatgttgaaaatggtccagctcgcgcagcgaaaatttcacgccaaattgctgacttaggcgatttatgggcagatggcgccgaagtatctcgtagccgccgtgaagattatgactttattcgtcctcgcacgttagctgacgatgtattatcaagtaacaatgccgcttctgctgtgacagctcgtggtcaccagttcccaatggcattcttagcgattgttggtggtttagataaacatggtactgaatcagcgcaaccattaccgtatgttcatatggatatcgcaggtagcggcgtagaaggtggtgattggcaacatggtaagcctaccgcagcaacagtaagcagcttattcgctcgttattgtttataagctaaaagctataagtttttagttttaaaagccccgcacagtagtgcggggctttttttgtgcttggttattttctattgcttggtaaatataatgcaataaattaatctgttttaatggctttttaatttttatcttttgttttatttggttttgtcttgtacgctaaatttgtaaatggaattttaatatatgggtgtggtcttgctctcaaataagattttctattcattcacttatttttaatttaaattcaaaattaaagctgcgttactaatttcttttcatcggaatttatattgttttttttagttgttttttgcgtgattgggttttaatgagaggtttatgatttattataataattgttttttgatttttatgttgcttaattgctcactatttgtatatgccaatgaacgacaatcttggagcattctctctacagatgaaggagttactttctctgttaatgctgcttttgatctaaataaaagaagtctcgatattaatgactctaatggagatttatcctcacctgaaaatatagttaggctctattataaaaaattaaaaaatgaagattttgaaggtgcttactcgattatatatgaccgagatggaggtagggagcgatttagggctgacttttttggaaataacttaaagattaaacgtttggcaggggtagacagtttgaccattgattatattaaaaagtgggcagggtactatgtttttgatatatctatttttatttcaggtaagtgggcgtctttaaggcatgaagttgtatgttattcagaatgtaaaataatatatgattattttggtgttaacgaaatcaatgatttggttgatctgagctttatgactttgctagagagtaagagagtaaatggaagtactgcatttaagtttaaaagtaaaccgttgtctatttatatgcctaaccctttcagtaaggtgaatgttaagaatagtttggtttttaatttagttttagatgactttaatggtaatttagatttttcagagtgtaacagtaaaaaagagcatagaattgaaagtaagttttgtagtttatacataagtgctaaaaatttaaacgcagatactattggaagagttgattttgggtttttggacttgataacaaataaaacaggtgatggtggtttctttgtaaatgattattttgatggaagtgttaattcacatttttactctggctaatcggctattagctttattaagtcgtggtggaaaatagattttttgggtgtgttagattccgaattaactgagtttgtattttttagacctatcgatgtagatgggaaggagtttcctattcaagttgtctctatagataaggttagtgacaaattatactatggaagtaattgggaggatgcttatttgttttttataatgatatattttcatcagagcttgataaaattttaaagtgattttagtttttaaattagttattttccgatagacaagcaaagtcataaactaaaacatttatatgatgagcttttatttagctctgtacttactagccacgaattttataacaagttaggtatagcaaagttttagagggatttatgttcaaagaaggtgaagaggttttaacttttagaatggggggggagctaattttaaagccgcttttttgcttgcttgtaatgagaaggtatatgtgaaaaaaacttttctaggtagtatgtttccttattttttttatattccacttacccttactttttgtaaaatatcatatgaattttttattatggaggaatataaacttattgttgtatgttttgttttttactcctttcttgctagcttttttatttttatttttagaaaatctcgagtaaaaaaagagttcgactttgagtctggctattacaaagagggtggcaaaaagcttgtgcgtattgaagatatcagccagtttttagttatttctcactattgttcaagtagtagtggttcgccttatacagcttttcagtttggcttttattgcaaggaaaataaagggtatgtgttaatggatcatagtagctattcgagtattaaacgtgatgtgcaaatgatttcagagcggttgaatgtgccatacgaaattctaaatgagcatgataaatataagcctaatcctataagagctttttaataagttaaattatacttttaaatgaagtttagaataatacaagcaaagccataaattaaaacattcatatgatgaacctttatttagctctgtacttactagccgcgaattttataacaagttaaatgcaacacaattttaggaggctctatgttcaaagagggtgaggaggtgttaaatttcacaaatggtggcggagctaatcataaaacagcttatttgattgctggtaataataaagttcatgtaaagaaaacttttctaggtagtgcatttccttatttcttttatgttccgcttgttttgttttttttaatgttttcttatgtgacattagttctcggtagttattatttactaattgtttgtttttttgtttgttttgtttttggttttttagtttttttaatttttaaatcatcacgagtgaaaaaagagtttgattttaactctggctattacaaagaggatggtaaagagcttgtgcgtattgaagatattagccagttttttgttatttctcattattgcccaggtggtagtggttcgtcttatactgcgcttcagtttgggttttatagtaaacaaaataaagggtatgtgttaatggatcatagcaactattcgagtattgaacgtgatgtgcaaatgatttcagagcggttgaatgtgccatacgaaattctaaatgagcatgataaatataagcctaatcctataagggccttttaattaaggtactactatttattcaattagcagcaagctaattcattgtaaaagccccgcacagctgtacggggcttttttgtggcgttagtcgagcttgaagcggtttacgacatcacttaacgcttgtgagctttgctttaagttttcactggcgttcgaaagtccttcggtattcgacagtgattgctcggttgattgtgaaagctcattaatccgtaaattaacctcatctgcggcgctggtttgttgctcagtagcgcgggcgatttggctgttcatatctttgataatagtaacaagtcgctcaatctcactcaatgagctatttgcttcacctgcttgtgaaaccgtttcggttgataactgttggcttgccgatacagcatcaacagcagcttgtgcgcctgtttgtagtttactgatcatggcttgaatttcgtcggtacttttacctgtacgacttgctaatgtacgtacttcgtcagcgacaacggcaaagcctcgtccttgctcgccagcacgagctgcttcaatggcagcattgagtgccagtaagttggtctgctcagcaatgctgcggataacatcaagtactgagccaatgttgttactctctgcagcaagatccgccgttaccttactcacttgttcaatattatgcgacagtgtctcaatggcggtaatggtcttgttaagaacctgcttgcccgcttcggcattttgcgcggcttcattagcggcatgctcagcttgatcggcattttgactaacatcgtgaatttgatgagtcatttgttccattgcggttgctacttgagttgagctatcgttttgtagctcaataaaagagtgatttgttttactggcatcatcaacactatgggcaaactgattaacttgctcggcattgtgggcaacatgtttcagtgactcacgcatttttgcggtgtacaaattaaagtagcgcgataaacgagacacttcatcattgccattttcatcaagcttttgggttaagtcgccttcaccttgcgagatgtctttcatcatgtcggcggcaagttgtgtcgggcgcaagatgctattggcaatgaggtagcttagtgcaactagtagggcaatgatcactaccgcgataataatcacattgttacgtagcgaagagaatgcttcttcaatagtatcaatatagacaccagaaccaacaatccattgccatttatcaaagccttttacgtaggcaattttatcaaccggctcgtctttacctggctttggccacttataaggaataaaaccttcaccttgttttttgacgatattaaccatatcgacaaataacaacacgccatctggatctttactgcccgctagcgatttaccatttaattcgggcttaaacgggtgcatgaccataacaggttgataatcgttgatccaaaagtaattgttgttgtcgtaacgaagtgctgaaattgtttcgagggctgcttgttttgcttgttgctcactcagtttaccttgctcaaacaacgcatagttatgctcaataatagagtaagcagattcaacaaggttttgggttttaatgtattgctcatgttttagcgagctgtattgctgcgttaaactcgagacgcttaaaaatatcagccctatcacgaccacactcactaacatggcgaggcgctgaaaaattgtaaaacggcgtaaattcatgtgtgttccttcgtcatgctcataagagcaatgtattaagcgtagccaaaatgggtcgaaaatctagttaaatagtagaatacattgagacaaaaaaaaggctgatttaacaatcagcctttagtctaagttaccgaaataaaacgtgattactcaacgttaaagtgtcggttgaagaaactggtgatggtttggtgtaagtgcgtttgtacgctcttaccacgtaaactgtgttttgagcccggataagtcatcatttcgaactgtttttcttgatcttgcagttgtttaaataacttagtggcatgagtaaataacacgttatcatcagccataccgtggtaaatcatcagtgggccttttaagccttcggcatatgggaaaactgcacttgcttcgtagccttttgcgttagttgcagggtgacctacataacgctcagtgtagtgagtgtcgtaaagtgcccaatcagttactggcgcaccagaaacaccggctttgaagtagtcgcccgctttaaacatagtcataagcgccatataaccaccgtagctgtgaccataaataccgatacgctcagggtcaacgtaatcaagggtgcgtaagaactcgacacctttaatttggtctgccacttcagccacacctaagtgcttataaatcacgtcttcaaactttttaccacggttgtatgaaccacggttatcaagttgaaaaataacatagccttgttgtgccatgtactggaagtataagtttttactacgccagctgttcgttacacgctgagcatgagggccgccataaacgttaacaataaccgggtgctttttaccatcttggtaattagttggcttgaataaacggtaatgcatgatttgtccgtcttcagcctttaacgtgccgtattcaggcgtgatcaaatcagctaggtaaggcgttaatgggtgtgacttatctaacttgttttcttcaagccaagtgataaattcgccattaattttacgtaatgctgcagagccaggcttattcactgatgagctgttatcgataaaggttttgttatctttagcaatcaccacattatggtaagcacctagctcagttacgcgtttaatttcgccttttttgaatagcggtacgctgtaaaggtggctctcaagtgctgtatctttgcgacctgcaaaataaacgatgccttttttctcatcgataccttttaagctatcaacaacccattcaccttgggtgatttgacggatcatttcaccgtttgtgcggtataaataaaggtgtttaaaaccgtcgcgctcagatgcccaaacgaaatgtttcttatcgtttaagaactgcaaatcaaagtgcaggttaatccaagtatcactggtttctgttagggcaacggtttgttttttagtgtcgctattataaaaacgtaactctaagttatgttgcgagcggtcttgccactgataagaaagtgttttgttatcttttaaccattttgcgcgagcgatataaatatcttgatcgtcgcctaaatcaacccagtcagttttttgattgttgatgcttacaacacctaactgaattttaacgttgtcggtacctgtaaacgggtagcgctgattaaatagctttacttcatcggcgtaaatctcattacggattgcttcttttactgggctttcatcaacacgggtataagcgattttagactcatcaccagaccaccagtagccagtcatgcggcccatttcttcttgcgcaacaaattcggccataccgtttttaataacgccgccgccatctttacttaattggatttcttcacccgtttttaagttaagtgcatacaggttttgctcacgaataaacgacacatagtggcctttgggtgagaaacgtgcatcggtttcgaatgcttctgtgtcggttaatttacggctttttgctgaagcaagctcataatagtaaaggtcgccattaagcgggaataaaagcgctttaccgtcttttgaccatttatattctaagatccctttaccaaaaatacgttggcgctcacggcgtgctttttcttcatcagataagttttctgggccagaaaatagcgcagcagagtcaactaataagcggtttttgttatcttttaagttgtattcccataagtcgtagcgattgtaatcatcggttttaccttgcaggtaagttacacgactgccatctggagagaatttaagttgtacaggcgctttacctgctaagcttggatcgtcaaaaatacgttcaagagtgagtggttcagcggtcacactgaatgctgttgccaccactggcaaagcaagtgagagagatttaattttttttagcacaagggtaccttcgctcgaataaaaactgccacgatggtaatggtaagcttaggcaactgcaacaaaatgctataaagtaggagatgtttacccattatcaaaggatttattgatgaaaaatgccgatatgctgttttctttggccccagaactagcacgagactgtatcgaacttgctgattggccgttatgcaaagtgttattgatgaatgacagccagtatccgtggttcattttagttcctaggcaggcagggttaagagaaatcattgatctatcagaagagctgcaaatcgtttttttacaagagtcagctaagcttagtaagttgattcaacaggtattcacaccagataaattgaatgtggctgcacttggcaacatggtgccacaattacacattcaccatatcgcgcgctttaaatctgacccagcatggcctgcgcctgtgtggggcaagctcccagccatcccttatactgatgagcaaattaaacagctaaaagcacacttctaattgatgtaaaatagctaggatgaactaggataaataaatgaaagaatataagagcacctcgtaatgaaaatgtatatttttgtcgtgctctttgctttgagttcagcacctagcgttgcgaaaagttattattttgttggcagtcattttccatcgattttagaacataatgaacaaggccaggtggttggccttggtggcgatattgctcacgaaatatgtcgtcggttggggcatacgctagttattgatattatgccgttgaaacgtgccttgaagatggttgaacaaggtcatgctgatgccattattggcccatacaaatcccatttgcgtgaacagtacatgcattatagtgctttaccattttacgaagacccgatagttttttacaccaaaccggatagtgaggttacgtgggtaggtaattttgccagtttacgaaaagatactattggggttattcgcggttggaactatggtgatgagtttaaacgcaatgcatcgagtttgtcgctgtctgaggtcgccagtgtcagggctagctttttgcaattaatgtatgacagggttgatgttatcctgactcaccctcgtgccgcgaaacctgttatagatagtttaaatattaaagataaagtggttatgctatcgccaatcgtgacagtcaatcaaggctattttggttttagtaagcgtcgtgaactcgatgaatttattaatgcctttaatgctgagtttcaaaaaatgttgatcaacggggatattgttcgtttgaacaaaaagtatgaactcagctttgtcgctcattattaaaaaacgctgcatcatggcagcgttttttatttgagttttgctattaattactgcaagcgagcgcctgcaataaacttatagacccaatacttctttaccttgtttaaaggtaacatcaacaggaatatttgctttacttagtttttctaagtcttttgcaagttctgctttaatttcaccatgtgtggcgattaattgatccactttttgataatcaccgtcaccttgaatggtaagaattaagcgagacagtttttccattgcaaggctcattttctccatgttaacgctgtataggccgtcagcatttttagagaaagcaccttcttcagcaaagaagttaaagcggatcatgttcgctttaccgtgtgcgcttgatgcaccaaaacgtacagagcggaagatacctgccataaaggtgatgtagtaatcttctaatgtaccatcagtgatttcgcctttcttaagtaattgctcaaccatgtaaagacctaagatatcggctttaccttcttcaagtgcgcttgcatgctcctgtaatgattggcgaacagtacctttatcggtaatcgtgtttttgatacctaaaccatgcgctacttcatggaacatggtgttggcaaagaacgcatcaaaggtaatgtgtttacgttgttcagggacaatcaactgctcagagattggcactaagattttatcgaatttagcacgcatagcgtttttaagttgcagacgacgggtgcctttttctagttgaacttgctcatcatttggtaggttgatagcaattgttttactacctgcattagagtgaccagcatagtaaactacatcatacgcgtttaaatctgcatcagagccaggaacctcttgtttgtacttgtcgtcaacaggtaagcctttttgcagttcaggtagaaacgccgcaaacttagctagtcgttcactccaggcaagatctttaacaagcacatacgactcataggctgcacgataaccgaatagttgatcttcgtaagtttcaatcggaccaataaccacatcgattgggttatttttcatatccatccatgcaaaatcagaagctctaaagtcatcagtcacaagcgcatctgcgcgcatgcttaagtaatttgcaaattctttatcatcagcaagctggcttgcttcgcgcagtaagttggccgctttttcaagctcttgtgcgtattctactgaataagcaacgctataaagtaaacctttttcgtcacgcttaatgacagagtaaagccctgttttatcatctaaaattgctttgtttagctcttctttgctcatatcacgaggataaaactcagcgccagctgctttttcttcatagccagataaaaagacttcatcgccatttaagcgatcccaagggccatagttgatatcagcaaatttttgtattttctgatcattaattttcgcaaggaaagcatctttattctctccaaatgcttggcgccagaatagctcatccatgatttttgatgcatcaattaacttaccgatcatttgtttttggttgtcgcttagatggcttaaatctgatgtaagggtaaagtcagtgtaaatatctaaacgattgcgatcgatattaataagttgcgggttattttctttagcactttgctcagttgtaggtttcgcttctgatgatgttgctggttgttcagaacatgcgccaagaaaaacagcgccagataagataagtgcttggctaattttatttaatgtcatttttgcccgttcccgattttttggtgagagtgattgtttagaaaacaaaacgtgcacgcattaaagcaaaactgatgcgtacctgacaagtttactctatttaggggtgtatttagcctaaaattattagttaataataaaaaatagattattgctgtgattttcttaactttagcgctaagttagtcaatactaaaactataattaatttaataatgtcagtcagtagcttacctgtaaagtgagctaccccaagaggatggcacacatatgtcaacagaaaatgcattactgaccatattggtcgatagaattaataacgatacattagtactacctacattgcctgaagttgcagtgaaggtgaggcaggctgcagataatccaaacgtacacctaatggacatggctgatgttatttcacacgaccctgcattatcagcgcgaatgataaaggtagctaatagtgcatttatggggcgctcagtaaaagtgaccaatttgcatcaagcggtaacacgaataggcttacgacaaataaaaaacatcgccacagcaatggcgatggagcagctgtttgtgtcacacaatgagttgatcaaaggctatatggataaggcgtggcaaaaaacccttaaagtcgcgtgtcactcaattactttaatggacttcttcttacgcagaaataagcaaacctcgcttaatcgcgacacaattactttggcggcactagtttataacattggtgtattgccaattttaactgaagctgaaaagcatcctgaagtattcgcaaacccaagtttccttgctcatgctatccaaaagttgggcggtaaagtaggtggtgcaattatgcgtgcttggggctttactgatgagtttgtcgaagttgctgaaagttgggcaaatccaaactatcgtccagagcatatatgttatgtcgacttcattcggattggcgcgatattagaagggatcttacaggtttctgataagtcagcagcattacaaacctatatggacaaaggcgtgattgaatctcttgatatgttcaacgaagatgagtatcacgacatgcttaatgaagtaaaagcaatttttactgaataactacaacaaaaaagcgcgaccaagtcgcgcttttaatattaaccattatctgagttaattttataaatcttcttcgtcacctaagccttgggtcagatcttctagcaactgcttaatttcttctgatgctaagataaagtctgcatcaagttttaccgccatatcttcttttggaatgtcggcgttttcttcttttaatgtttctgaatagcttaagcgcttaatagagccatcgttttgcagcatgaacttaacgcgctcttgccaatcaagagcaagcttagttacgcgcttaccattttctaggtgagatttaacttcatcacaagataggtcatggccttttaattttacctgagcgccactgtcatcggcttcttcaagctctgcatcgttaccgatagaaaagccctcaggggtactgaaattagttaaccagtcagttaaaaatacatctaaatcgtagttggcaaatgcgggtaccacaggcagtgtgccaagtgatttacgtagtagggctaaaagctcttctgctttattaaagcttgcgctgttaaccacaacccagccattcttttggtcaataaatgcaaactgtaggctcgactttttgaacgcttgaggcagtaaagtatgcagaatattttcttttagttcgtctttttcttttttctttactgggcggttttcttcggcttcgatttgctcaactttttctgccaccatttcattgataacagcggctggcagaactttttcttcacgcttagcgcatactaaaatgctgccttgagagaaatgagacagagtttgaccatgcttaccgaacgcttttgtccaaccgaaagttgaaagctcttgacctgtacatgagcggaatatgtcttgctctagggctttgtcgaagtcttcttgagagtatgaaacgtcttgtttaaaacggtaacagataaggttactaaaccacataattaggctaatcctttcaataaatttgcccaatcataacaataaaaaactgatgccgaaatgaatcatttcggcattagctctaattgcttatgagttaaacattgaaagtggttttggcatgtttttcggaaaactaatatggtaatgcaagcctttgcctacttcgcttgatacttcaatatcgccactgagcgtctgcttaacgaggttaaaggtaatatgcgtacccaagccactaccgccttggtcacgtttagtggtaaagaacgggtcaaacagtttttcgagctgatctttcgaaacgccattgccgttgtctttaaagtcgataactacttcgtcgtcttcatctttgatgattatgtcaatcacgccactttcgatgccttcaaaaccatggatcagagagttcataatcaaattcgtaaagatctgactaatcgcaccggctggtaaatttaaggtcaaatcgctagggcaatctaaattgatatgatgggatgttttcttaagtttagggtgaagagagcgaattacttcacctaagtactctttaaaattgatagtgcgcacagcttcactagcttggtctactgcgatttgtttaaaactcgcaaccagttccgaggctctatctaagttactcgtcaataggctggtgctttgtttagcatcattaataaattcttctaacgcttttggcgagagtgttttgtctttatatgcagcttctatttgatcaaggcgctcttgtaaaaatgaagtcgcagtcacgccaatgccaattggcgtgtttacatcatgggtgataccagcaactagaccaccaagtgcagccattttctcagagccgactaaacgctcttgtgccatgttgagttcatcaaggtaacgctgcagctcgttttgtttagcaatcagctcttgttcggtctgtttacgtaaatcgatttcttcggtcagcgtaagcttttgcttttcaagctcgtatttttgttcttgtaagtccatcatcgcttgactcaaattagacgttttacgagctacttcttgttctaactgcaaattgtgttgatcgagtttttcattactgattaacaactctttttgtgtgtgctcgagctcttcacgataaagtacaactttgtcgataaggcgattgaatgactcttccattactttgagctcattacgctcggtggttttcacttcaatatgacgaccttctaagtcattgagctctaaatcttcgatttgttctgtaaattgtgaaagaggctctgtgagtctttttctaaaggcaagtaagaataaaaagatcaaaaaggtggttttgatcattgcattaccaatcaagaagtagatagaaatcatgattcgactaaaaacgacttctcgacttgagaacaatgtgacatcaccaacttgagtcgttttacctgaaaactcaaaaatcagtggaaatgtataaccgaacaaacctgaaggcgtgtcctcaataatggcttcttcttgcactaactgttggctgtaaagttcatgtatatctaaagaacggccaagttgcgaaagaacttcaccactatcgtcacgaacaataatgccttcaatcatggggattgctaataaaccttcagcggtcgtaatagtctgtttatcattaagttcccaaatagctcgggttaaactgcgactaaaggttttttgcagtgttgttagttcatcgcgaatgtaatctttggtgttaacgtattcagcaataacctgtccacatgtcactacaaaagtaagtagaaagtagaccgatagtacatttgttaataactcttttgacaggcttttttgtagcatggaatatccatagctccttggtgacatgattaatacattcagctagttctaaagttagctaataaatgcttaaaaataaataaatatatccttttttactggaagtttattaattgttactaatttcttaataaacttagccttactgcactaataaaagtgtgttataaatttgtaccgtatttaattttagactttttttacgttgtaattgtgacaacgaagattttatttcatggataatcttaattttaccgtgctggtctgtgatgactctacaatagccagaaaacaggttgtgcgctgtttagatgattgtctcagtgctgatattcaacaagcctcaaatggtcgagaagcgcttgccttgttaagagagcaaagttttgacttgctgtgcctagatttaacaatgccagaaatcgatgggatcgaagtgctcgaatcaatcaaggcggaaaaaatagaatgctttgttatcgttatttcggctgatattcaagcagaaatgaagcaaagagtagtaaagttgggtgcaattgacttcattgataaaccgatagatattgtgcgcttaaaagctactttgcataaatttggtattcgttaacttttaaaattatttaaatgcataatttatctttttttaagggttgacatcttggctgtttttaaggcagtctacagactatgaaaacatttaatcacgcaacgaccattattattacaaccatcatccttacgggatagtggcataggtcggtgcaacaaaactataggcctgtgttcactagaacacaggcctttttcgtttatggaatgaggaaacataaataatgcgagtattaaaatttggtgggtcgtccttggccgactacgcatgtttgcaacaggtagctcagttagtcaaagaagaactgaaagatgaaatgttattagtgctatctgcaccgggtggcatgacagactctttggttgcattggcaagtacagccgaacaaggtcaagactttagtgagcagtggcagaatttagttaatcgctgtgagcagctaaaatcggcggtagaagcagactatgggcaagtagcaaactggccaaacttaagtgagttaaaaaataagcttgatggagtggcgctattaaaatgttgtccagatcaagtgcgcgcttatgtaattagctttggtgagcgtattagtgttgctctaatggagtgtatgctcaaacaaagtaatgcacgttatttagaagcaacagaatgtattgcttcagtgggtggctacattgatgcagaggctgaccttaatgtaagcaaattacgttttcaagaagcgttaaaagctgccccaagcactatttatattatgccgggctttactgctgcgaatgagcaaggtgaattgactactcttggtcgtaatggctctgattattctgctgcaatagctgcggcgtgtttagacgctgatgtatgccaaatctggactgacgttgatggtgtttacaacgcagatccgcgttatattaaaaaagcttctaaagttgattcgctatcttataaagaagcgatggagctttcttattttggtgcgaaagtattgcacccgaaaacgattttaccttgtgccaaagcgggtgtgccgtgcgaaattaaaaatactcataacccacgtgccgaaggttctgtgatcagtaacgacagtgtatctaacgagccagttaaagcgttatcaagtttacaaaacctcgctatgttgacggtgtcagggcctggtatgaagggtaaagtggggatggcatcaaaagtatttaatgccttggctcatgacaatgtctcaatcgtattaattactcaatcttcgtgtgaatttagtatcagcttttgtgtgcatgagagtgacctatcacttgctttagaagcactgcaaacagcctttgaattagaatcgcaagctggtttaatcgagcctgtacaagtacaacgtaaccttgcaattgtcactttagtgggtgataacatgcgtgctcacaaaggtttagcggccaagttctttgcttcattagctcaagcacaagtgaatattgtagctattgcacaagattcaactgaaagcgctatttcagcagtgattgacggtgagctatgcaacgacgcagtaaaagtgtgtcacgagaacttcttttctcacatcccatcaatcgacgtgtttttacttggttgtggtttagttgggcaagagcttatccaacaattagagcgtcaacaagcgtggctcgaaaagcgtaatatcaagcttaatttatacggtgttgcgaattcaaaacagttatacctagacagtgaaggtatcgcttttgatggttggcaggataaactcgcagcctctgaacaaggcttcgaccttaatttagttgagcaatttgtaaaacaaaaccaccttattaatcctgtaattgttgattgtagctcagccgataaacttgctgcgcaatatgttgatttcttaaatgcaggtttccatgtggttgcggcaaacaaaaaagccaatactagctcgtatgcgtactaccaagatttagttgcagcgacacaaaagaataaccgtaagtttttatacgaaacaaacgtaggtgcaggcttaccggtacttgataatctcaaatcattatttggtgcaggtgacgaactaattaagttcagcggtattctatcgggctcattatcgtatatgtttggtgcgcttcaggatggtttatcgcttagcgaagcaacattaaaagcgaaagaaagtggttttactgagccagacccgcgtgatgacttatcgggcacagatgtagcccgcaagctgttgatcattgctcgtgagtcgggtcttgagttagaactgagcgatatcgaagtagagtctgtattgccaaaagggtttgcagaaggcgactctgttgatgagtttatggcgaagctacctagtctagatgctgaatttaacgaccgcattcaaagtgcagccagtgaaggtaaagttctacgttatgtaggcacaattgaaaatggtcattgtaaagtcggtattgaggctgtcgatagcagtcacgcactttatgatattcgcgatggtgaaaatgcattagcaattttaagtcaatactatcaaccacgtccgttcgtgattcgtggctatggtgctggtgctgaagtaacagcagcaggtgtatttgctgacatcctcaaaacattaacacgataggagcaggttatgatccgtgtatatgcacctgcttctatcggcaattttgcagttgggtttgacgcattaggcgctgctttagcgcccatcgatggcactttattgggtgatgtagttgaagtaagtccagctgagcaagacacttttgtatgctctggcgactatgcccataaactgcctgccaatgcagaagaaaacctagcatatcaatgtttaattcactttaaagaacacgttgcgcctgctatgccagcggtaaaacttgaacttaaaaagaatctacctattggctctgggctaggttcaagtgcttgctctgtggtggcagcctttgcagcccttgataaatttgcaaaaaccaatttatcacaagagcaactcatcgaattgatggctgattttgaagctatggttagtggcggtcgtcattacgataacatcacaccatgctatttaggtggtttgcaattaactggcgaactcatccccaataaatcaatttcgttacctgttgataatcaatggtattacgtggcggcttttcctggcttttcgctaaataccgcaaaagcacgctcagtactgccaaaacaattgtcaatgcatgacagtgttgaatttgcacaacgtctttcggcttttagcagtttactgctaacgggacgctttgatgctgcgctatcaatcatgactgatgaaatagccgagccgcatcgagcaccccttatccaaggttttgccgaagcgaaacaagcattacctgagcttggtgccgaaatcgtcagtatttcgggtgcaggcccaacattatttaccgtgtgtaaaagtttagatgctgcagaaaaatgcgcagcttggctgaacgataattacattaatgagcagggtttcagccacatctgtcaactcgatcagcttggcacacgagagctttaaagaatttaaggaaacaacatgcaattacataatttaaaagatgaatcacaacaggtgtcgtttgttgaagcggtaaaaacggggttagggcgtaatcagggtgtcttttttcctgatagcttaacgcctatcaaagatgttgatgcgctacttgatttggactttgttagccgtagcagcaaaattttatcacacctgattggtgatgagctgcctgccgatactgttgcacagatggtgcaaaatgcgtttaactttgatgtgaaattggttgaagttgaaaaagacatgtattgcttagagctttttcatggtccaacgcttgcctttaaggactttggtggtcgttttatggctgagtgtttggcgcagtttaaccaaggcgaaaaagtaacgattttaacggcaacatcaggtgatacaggagccgccgttgcccatgcgttttataacaagccaaatattgatgtagttattctgtatccgaaaggtaaaatttcattagcgcagcaaaaactgttcaccacacttggcaataacattcactgctatgcggttgatggtagttttgatgactgtcaaagtatggtcaaaaatgcgtttttagacgatgaagtaaaacaaaaacttggccttaactcagctaactcgatcaatatcagtcgcttggtcgctcaagtgtgttattactttgaagcaatagcccagttgccaaaagaaaagcgtagcaaggcacatatctcagtaccaagtggtaactttggtaatgtgtgcgctgcgatgattggtgctgtacttggtatgcctgtcgcaaaattgagtgcaacaaccaaccaaaatgacactgtgccacgttttttacaaagcaaagagtgggcaccgaatgacacgcttgagtcattatcaaacgcaatggatgtgagtaaaccgaataactggccacgtgttcaatttatgttggataataattggtttagctatgatgacttttactcaagttgtgttggcgaagaagaaaccaaagaagtgatgaaaaaaattcatcaaacgggttatatcgcagaacctcatacagcgattgcttatcaaggcttaaaagaaaatttagcagatggcagtgccggtatatttttagcaacggcacatcctgctaaatttaaagaaagtgttgaagatattttaggtattgagttagcaatgcctaagcctctagcagatgctcttgctaagccttgtttagcagaagacatcaagcatgattatcaactattgagaacagagcttttaaataaactagcttgaagtaattaaaagagcggcattgccgctcttttttaatgtgataatgaatggctgtggcggttcaataatcgcattgcaattatcactaacgcactaaaacatagcaaagcgcagcttaataagatgatctcgttttgcgtccattgtgttaaagtcagagcactaatgaataaaataaagggtttaaattcatagtaatagcgcgctcttctttgtttaattcgctgacttttttgatctcgtcttcgtgcttctgatcgcattcgccatatgtttgcacccagcaaaaataacacaataccaatgagtgtgtagagcagctcatgaggtatgacgatacaggcaatacctaaaaacaaatagcagtagggaacaagttcataaatgggcttggctaacattgactcaaaacatccttgatctgggtttgtattacaagcttagtttcattgtgcccatatgcaaacgcatgatgaactttttacgctaaatcatattttaaaaatatatgtaatgttttaaatttataaatttttattatgtatcaataaaaaaatatcattattaaaacactgtgaaataaattcaatccctgtttaaatatgttcatctttacaagataggcaaaagtgcgttttaagcgtacaatatagccttcaaaaaataccatacacgttgccttaggagaccccatgttagaacgtagcatgaatatttcggatttcgatccagagttatttgcagccatcactaaagagacggctcgtcaagaagagcacatcgaactgatcgcgtctgaaaactactgtagcccacgcgtacttgaagcgcagggttctcagcttaccaacaaatatgctgaaggttacccaggcaaacgttactatggcggttgtgaacatgttgatgttgttgagcagctagcaattgaccgtgctaatgaattattcggtactgattacgctaacgttcaaccgcatgcgggttcacaagcaaacgcagctgttttccaagcacttcttcagccacatgatacagtactaggtatgagcttagctcatggtggtcacttaactcacggttcacacgttaacttttctggtaaaacgtacaatgcaattcaatacggcctaaatgacgaaacaggcgaaattgattacgctcaagttgaagcgctagcattagagcacaaaccaaaaatgatcatcgctggtttctcagcatactcaggtatcgttgattgggctaaattccgtgaaatcgctgacaaagttggtgcatacttattcgtagatatggctcacgttgctggtcttatcgcagcgggtgtatacccaagcccaatccctcacgcacacgttgttactacgacaactcacaaaacattagcgggccctcgtggcggtctaatcgtttctgcatgtggtgatgaagaaatctacaaaaagctaaacagcgcagtattccctggcggtcaaggtggtcctttatgccacatcatcgctgctaaagcagttgctttcaaagaagcattacaaccagaatttaaagcgtaccaagctcaagtggtaaagaacgctcaagctatggttgaagttcttcaagagcgtggctacaaagttgtttctggtaaaacagacaaccacttattccttcttgacctaatcgataaagatatcacaggtaaagatgctgacgctgcactaggtaacgctaacatcactgtaaacaagaactcagttcctaacgacccacgttcaccgttcgtaacgtctggtcttcgtattggttctccggctattactcgccgtggtttcaaagaagcagagtcaaaagagcttgctggctggatctgtgacgtactagacaacatcaatgatgagtctgtacaagctgaagtaaaagagaaagttaaagctatctgtaaaaaattaccagtttacgcttaattattggttaaaccttaattaagataacaatagcgttgttttttgctattataaaggccgcttaataagcggccttttttgtttttaataaacggaagctgaactctatgcattgtcctttttgcaccgcaaaagatactaaagtaattgattctcgacttgttggcggcggccaccaggttaggcgtcgacgtgaatgtaatgaatgtcacgaacgttttaccacctttgaaggcgcagaacttgtgatgccaagagtcataaagcaagacggtagtcgtgaaccatttaatgaagacaaattactcaatggcttgcaccgtgcgctagaaaaacgccctgtcagcaccgagcaggtcgatgaagtggtcaacattattaaatctcagcttcgtgccacgggtgaacgtgaaatttctagccatttaattggtgagtgcattatggagtcactaaaaaaactagataaagtggcttatgttcgctttgcatcagtttaccgttcttttgaagatattcgcgagtttggtgaagaaatcgctcgtttaggtgattaactatgtcattcacagaacttgatacggcttatatggcacgcgccatagagctagctaaacaaggtcgttttactacaacaccaaaccctaatgttggctgtgtactggttaaagatggcgaaatagtcggtgaaggatttcatcaactagcagggcagggccatgctgaagttaatgctctggcagtggctggcgataatgcaaaaggtgccaccgcatatgtgactttagaaccttgtagtcattatggacgcacaccgccttgtgccgacggtttaaaagcagcgggtgttagcaaagttatagctgccatggtcgacccaaacccagcggtgagtggtcgcggtctacagattttagctgatgcaggtatcgctgtagcatcaggtttacttgaacaacaagcgcgcgatttaaacaaaggctttttaaagcgcatggaaactgggttgccatatgtgatttgtaaaatggcttgcagtttagacggtaaaactgcgctaaataatggccaaagtaagtggattacagggcctaaagcgcgccaagatgtgcaagcatttcgtgcgcaaagctgtgctatcttaaccggtgcagataccgttattactgataatgctaaacttaatgtacgcattgatgagctgccatttgatatgccaacgtcgctgcctttgcgtcaacctactcgtgtgattattgattcacaaaataggttaacgcctgaacttgcattatttagcattgaaagtccggtgattattttcactacatcgcttgataaacagcatcaatggcctcactttgttaaacacgaagttgtaccagcagttaataataaagttgatttatcagcggttttaaagcgtcttgctgaactgcaatttaaccatatttggctcgaagcaggtgcgacccttgccggtgcatttgctgagcaagatttaattgatgaatacattgtttatattgcccctaagttaataggtgatatgggcaaaagcttactaaactttgcagaagttaccatgatgagtgatatcactgaactgacctttactgatacagtgatgattggcgacgatattcgcttaacagcgacaaaagcaaagcaagccacacacattgaaaataaagagtagcactatgtttactggaattattgaagcaacaggtaaaattgttgaactaacacaaaagcaaggtgacctagctattcgtattcaaagcactaatttggatatgaaagacgttaagctcggtgacagtattgccaccaatggtgtgtgtttgacggttgtcgctaaacatagcgatggttttagtgctgacttatcaaacgaaacaatcagcttaacgggctttgctcactataaaaaaggtcaaacagttaaccttgaaaaagccatgcaaccactttctcgcttaggtgggcatttagtatctggtcatgttgatggtattgcgactgtagaaagtatcagtcctaatgctcgtgcaacagagtactggctaagtactgacaatgatttaatgaagtacattccttacaaaggttcggtatgtattgatggtattagtttaacggtcaacgaggtcgagcaaaaccgcttcaagttgactattgttccgcataccgcagagcaaacaacgattgcagaatttcaagtgggtactcaggtgaacctagaagttgaccagattgctcgctatttagagcgcctaataaaaggggccgaacaaccttcccgttcagacatatcaatgagcttgctagcacaagctggttttattaaataagcaaagatacgtcactattaatcatactctcatgggcacattatgaatctacacagcgcgcaagaaattatcgatgacattaaagccggtaaaatggttattttaatggacgatgaagacagagaaaatgaaggcgatttaatcatcgcagcagagcatatcagtgctgatgctatcaattttatggcaacacacggccgtggtttaatttgtttaacgatgacgcaagagcgttgccagcagttagatttgccgttaatggttaaaaataacggtgctgctttttcaactaacttcactatgtcgattgaagcagcgaaaggtgtaacgacaggtatttcagcagctgaccgagcacgtacagttcaagcagctattgccaaaggtgccgtgccgagcgatatcgtacaacctgggcatattttcccaattatggcgcaaccaggtggcgtgttaacacgtgcaggtcataccgaagccggttgtgatttagctcgtttagcgggtcttgagccttcgtctgtgatcgttgaaatcttaaatgccgatggcaccatggcgcgtcgtccagatcttgaaatttttgcaaaagagcatggcttaaagattggcactattgcagatttaatcgaatacagaaacctaaacgaaaccaccattgagcgtgttgctaaatgtaaactgccaacagatcacggtgagtttgatttagttacctacaaagacaccattgatggtcaacttcactatgttttacaaaaaggtgaagtatcgaaagaagaaccaacgcttgttcgtgttcacttacaaagtactttcaatgatattttattatctgatcgtagtgctgatcgcagctggggcttatcggatgcgatggcttacattgcagaacacaatggcgtgctggttattttgggtaagcaagaatcaactgaagaccttgaagcaatggtaaaagcatttgctgccgaagatgcgggtgaaaatgtaaatcatcgtaaattccaagggacatcgcgtactgtcggtgtgggctcgcagattttggctgatttaggtattgaaaaaatgcgcttaatgagccgtccgaaaaaataccatgcactatcaggtttccacttagaagtggttgactacgttgagccgcaatcttaattaacgcgtaatttaattaagaggtttactcgtaattttatttaaattcaatgcggttagcgttacgagtggccactagagttagatttattagccagagttcaggttaactaggctacttttatatttttgtggtattatgcgccgtaatttttgcgcaatcgcaaccgcttaaacttattttttagggttattaaatgaaaattattgaaggtaacaaatacgcaccgggcaaaaagtttgccattgtcatttctcgctttaatgactttattggtagcagcctattagcaggtgctgttgatgagcttaagcgcacaggtggcgtatctgacgacgacattactgttgtttacgtaccaggtgccgttgaattacctttagcagcgaaacgcgttgcagcaaagaaagaacacgatgcaatcatcgctctaggcgttgtgatcagaggtggtacaccacactttgatttagtcgcaggcgaatcaaacaaaggtcttgcacaagtatcacttgagtacgatatcccggttgcatttggcgtattaaccactgaaagcattgagcaagcaattgagcgcgcaggtaccaaaatgggtaacaaaggtggcgaagctgctttaggtgcgcttgaaatggttaatgtgttagacaaaatttaagtttaaggaatctctgtgaaaccagcagcaagacgtaaagcacgtatcttagcacttcaagccgtatactcttggcagttaagcggtaacccaattgctgatattgaacagcaaatgttaattgaaaatgatgtgactaaaatcgacgtcgaatatttcaaagacctagcacgcggtgttgttgttaactgtaagcaattagatgaaatcgttgcgccacatttagcacgcccagcagatgagttagacatggtcgaaaaagcaattttacgtctgtctggctatgagctgaaattccgtgaagacgttccatacaaagtagcaatcaatgaaggtattgagcttgctaaaatgtttggtgctgaagacagccataagtttgtcaacggtgtacttgataaagcagttaaagagctgcgtaagtaagtagccccgtaaaggagagccggcttgggccggcttttttgtgaatgaaggaatttgaattaattaaccgttactttaaaggtcgcggtatcatccgtcgtgatgtaaaccttggtataggtgatgattgtgcgttggtcactgtgccagaaaactgtcaattagctgtgacaaccgacacattagttgcaggtgtacacttttttgatgacatttctcctcgcgcccttgggcatagggcgttagctgttaacttaagtgatttggctgcaatgggtgctgaacctacctggatttcagtaggattgaccctgcctgaagtgaatatggaatggattgagcagttcacagaaggtatgcatgaaattgcggaatactttaatgtgcaaatcatcggtggagacactacacaaggtccgcttacaattactatttgtgccaaaggcattgttcctgaaggcaaagcattgcgtcgcagtggtgcaaaggtaggtgattggatttatgtgaccggaccactgggcgacgccggtgttgcgatcgaagcacgtaagcaaggtttcgacatcgcgcctgagcacttgagttatttaaacaatcgtttcgattacccgactccgcgagttgcagctgggcaggtattacgaggtgcggcttctgctgccatcgatatctctgatggtttattagctgatttaggtcatgtattggcgctttcacaagtcggtgcagtgatccatgttgataaagtacctgtgtctgatgctgtcagcgcatcaattccacgccctgaacagtttgactatattttaaattacggcgacgattacgaattactttttactgtgcctgaaagcaataaaagcatggttgatatgaaacttcgtcaatatggcgtcgaagccagctgtgttgggcaaataaaaagtggcgaaagtgaaattgaactactacttgatggtgaaaaatttaactatcaaggtaaagggtttcaacactttgcaaaggagccggtttgagtagtaaccgattatttaatttaaaacgcccacatcaactatttggtttgggttttggtttaggcctagcacctaaagcacctggcacctttggtacttttgctgcattaccatttatttttacaaccatgtactttccgctatggttacagattgtatttgcaattgtgatcagcgtatttggtatctgggcttgtggtaaaacagcagatgacttaggggtgcatgatcatcctgccattgtttgggatgaagttgctggttattatatcaccatgattggtgctgcacttagttggcagtcattgttagttggttttttattgttccgcttttttgatatcgctaaaccaggccctattcgtattctcgataggcgtttacacggtggcttgggcatcatggctgatgatattttagcaggtattttttcattaatttgtgtacaggctttgtttaaagctggctatttacccttttaaacgattaatacagtgttacttggtggcaagtatatgatgcgatttttagttgtctgtttgttggtgttatgcagtatgcctgcgtttgcatctattactgactacgtcgtcaaacaatggaatatccaaaacggcttgccatctcaatctcttaagagcatcgctcaagacgagcaaggctacatgtggctgggtactcagttcggtttgagtcgctttgatggtaatactttcaccaacttcaacacacaaaatagtgatttcttgccaagtaatggtattaacaagctattagttgatagtacggggttactttgggttggcactaaaaacgggatagtaaccctcgatccaagaacgatgatgtcgcaaacctttaatgttaaaggcccagtacgcgacattcttgaagactcgaaaggcagtatctggattgcagccaacggcctttattatgttgcacgaaatcaagtcaccctaaaccaaaactctgcgttagtcgtgccagtatcaaatgctacggcaatcacgcaaatagttggttcagtgagccaaatggcgttgtcgccagagggtatttggctggttaacgagcgtcacttattgcgtttaactaatacttcatctgattttgcaaagctgcgcttagaacttaccgcaaaagtctctctacctgagcgcctagcgcaaaccatcattcatgatatggcgtggcttgagggtaatttataccttgcctctgagcttggtgcctactttcttgatttagatgacgagctgcgtccattcccacttcctaacgcgagtaactctgccgtttacaagtttatgagcgactcagatggagcgttgtggatttcaacttatggccgtttactctttagagataactctggggactggcaatgggttgagccaagtcagcttgatcaaagtatttggtttgcagatattttccgtgataatcaaaataatatttggctggcaagtttcagtgaggggttatggcttgctcacgaagggcgtattgaacgccactcagctatttcaaatatgacagaagcggtgatggcgattagccaagcacctgatggcaaactatgggtggctaaccgcagtggtgtcggctactttgattacaataagaattttgtaaatcaaataccaagtaatcagtttggtcgggctgcagttcacgatttgcagtttgatggtgatcgcttatacattgctacaggtcgcggtgttttttactatgaaaatcaaaccttgtatacagtgccaggacgagcactgcgcgataaccctgtattcgcaattagccgttctagtaaaggcggtttttggctcggtactggccgcggtatgtaccgtttaagttacggtggcttaacaccttttgcttacaatgcgttcttgagcagtaaatttattacctatgtgcttgatgagcaaaattttggcttaataggtaccagtaaaggggcttattactttactgaccgtggtattgaaaaaattggcgaccaaaccagtttagaaagcgcttatgtcaccagtattttaaatattgaaggggtggggatattaattggctctcttaacgatggtttattttatcgcagcacccaaggtcagtggcgtcaacttgatgcaacagacggcctaccttacggctctattttcagccttgtttatgacaaacagttaaaacgtatttgggtaagtaccatgaagggcgtttaccgcatgccggtagagcaatttggtactgatatcgagagcttaaaagtagagcaagtgatctcatcatttgaccgacaattagatggtaaagccagtcagtgctgtgctggtcttggccatgatgctgttgcagacacaggtaactctatttggtacccaagcttacaaggggtagttgaaatacctaaaagtgttgagctttttggtgtgcaagcgcttaagccgcgtattgaaagcattattacgccgctgcgaagcttaagtaccgctactttaggtgataaacctgagttacaaattgatgagcgcgatgtgacaatcaaatataccgcaattgattactttgctccttcaagtattgagttccgttaccgtttaagtggtttagacagtgattggcgctatgcaaacacccgccgtgaggctatttatacaaatttaccgccgggggcatttttgtttcagcttgaagccaaacgtggtggtgaagattggcaaaaggctcgtcgtaccgagtacacattcgttgttccacgtcgctttgacgagaccatttactttagactcttgatcacaagtagttttattttattgttctacctcgtgttttgggtgtttagggcgcaagagaagcgtaaacaattagcacttgaaagcttagtaacagagcgcaccgtagagcttcgtgaagccaacgataagctcaatcaagtaaactctcagcttaagttagtcagtcactcagatgagctaacggggcttcgtagtcgtcgcttcttgtttgatcagctccctaaagatattgaacatttccaacgtaattcgcaatcattgcaagcacagggtaagtcgttggtgctactgataattaaccttgataactttagccgcatcaatgattcctatggaccacttgcaggcgatagttgtttacagcaaatggcgacattgttgaatagccggacacaaggctcagactatgtcgcacgctggagtggcgatgagtttttactcttattacgtgatttcaaacgtacagctatagacaattatgttgctgacttgtgtgaagcaattgcagcaaacccatttaggctaccaaatggggaatcgaccaccatcactgcgtctattggctggtctttctatccattacctttattgggtggtcaagtgattggctgggaaacgtctgttaatttagctgatatcgcgctacaccaagtgaaaaagcgcggtggtgatggcgttgcaaatattacctttgatgaacaattagatgcttttgagtttgagcaaaataataatgttgataaacaactgggtgttcttcaagaaacaggtcttgctgatattaaggtttggatgcgctaatataaacgatgacaaaaaaggagccttaaggctcctttttagttttattagtgtacggcttaggccataaactctttgatgctagttaagataccgtttgcatctaagcccatttctgcgtgcatttcgtcttgagtaccatgcttaatgaattcatctggaatacctaagttcaagatagtcacatttgctttaattgcagctaagtactcattcacagcagaacccgcaccgccagcaatggcgttgtcttctagggtaacaattacatcgtggctactcaacaactcgctaatagtctctgtatcaagaggcttaatgaagcgcatatcaatcactgttgcattaagctcttcagcagctgatttggcgttttctagtagcgtaccaaatgacaagattgccactttactaccttgtttgatacttcgcgccttaccaatttcaatcgcactcattgttgattcaacatcacaattgcctgcgctaccacgtgggtatcgtacggcaacaggctgattgcattggtaacctgtatacagcatctggcggcactcattagtgtcgcttggtgccatgataatcatattaggaatacagcgcataaagcttaaatcgtaagcaccttggtgagtttcaccatcagcaccaacaatcccggcacggtcaatagcaaataaaaccggtaggttttgtaatgccacatcgtgaataagttggtcgtacgcacgttgtaaaaagcttgaataaatagcaacaacaggcttcagtccttcacaagcaaaaccagctgcaagcgttacagcatgttgctcagcaattgctacatcaaagtattgcgctgggtactctttagaaaaacgaaccatgcctgagccttcacgcatagcaggagtaatcgccattagcttgtcatcttgtgctgccatatcacaaagccagtcaccgaacacatttgagaatgtggcagcgccaggttttgattttggtaatttagacatgctcggatcaaattttggtacgccatggtaaccaattggatccgcttcagcaggtttataacctttacctttttgcgttttaatatgcagtagctgagggcctttaaggttacgcatattacgtaaggtatcgaccaacatattgacatcgtgaccgtcgattgggccgatgtaatttaggcctaattcttcaaagaatgtgcccggaatgaccatgccttttaggtgttcttccatgcggctggcaagttctttcactggcggtaaacccgaaagaagttttttactgccttcgcgaatattggtgtagaagctaccagacaaaatacgtgcaaagtggttgtttagggcacctacgttttctgaaatcgacatttcattatcgtttaagataattaacacgttagggtttacatcgcccatgtggttcatcgcttcaaatgccataccagcagtaattgcgccatcgccaataacagcaaccgttttacgatctttaccttctttttcagcggcaatagccatgccgagcgctgcagaaatagaagtacttgaatgaccaacactgaaggtgtcgtaagggctttcttcacggaatgggaaagggtgtaaaccgtctttctgacggatagtatgcatttggtcacggcgacccgttaagattttgtgcgggtatgcttgatgacccacatcccatactaaacgatcttcaggggtgttatagacataatgaagggccactgttaactcaacagtacctaaacctgatgctaaatgaccactactttgcgaaactgaattaagcaggtattcgcgtaactctttactaaacgcaggtaacttatcttgcgcaatatcacgcagttgtgctggttcgtcaaccaaacttaataatggatacttgctactatcaagtgtcatgattttatatacatccttcgctaaccagagtgcattatagcccattgctgctctgattttttagttattttgtctttcttttttagacgttaataattacgctcaacaatatagctagcaaggcttgccagctcgcgggtgtcgtaatcaatagcctcaagtgctttatgagcctgagccaataagtcttgtgctttttgcttagcgcctgccatacctaataatgcagggtaggtcgctttattggccgcaatatctgaaccttgcggtttgcctaacgtttcggtgtctgcctctacatcgagaatatcgtcctgtacctgaaaagccagaccaattgcttgaccaaacaaattaagctgctttaacgtttgctcatcacattgcggcgcggccaaagcccccaaggtaattgcacagttgagtaatgcgccagttttaagttgatgaatacgttctagttcttcgactgtaattgctttatcagtggcttcaatatcaagtgcctgaccacctaccataccctctatacctgaggctttgcttaacgaggcgatcattcttacctgttgtgtcgcaggtactgcaaactgatggttagcaattaaatcaaatgctaatgtttgaagagcatcaccggcgagaatagcttgcgcttcaccataaacaatatgacaagtagggcggccacgtcttaagtcatcatcatccattgctggtaggtcatcatgcactaatgagtagctatgaatacactcaatagcagcggcaagaatatcaaggtcagctttgtcagctcccatcatgcggcccgtcgcataaacgaggtaaggacgtaagcgcttaccaccatttaaaacgccgtaatgagtggcttctttaatggttttttcagtgtttagtggcagttcgaaatagcgatttaaatgtgcttcaacgtcttctcgagcgcgttgtaattgttcttttaattgcacttaattagtccaagtttgagtcaaagttgctaagaggagcttggctatcgttacccattaatatggccactttttgttcggcttgttgtaattttccagatgaggcattcgctagcgctataccacgctcaaactgttttagcgattgttctaaagacagttcaccttgctccatttgtgcaacaatctgagataattcatccagtgcttcttcaaaactcaagttttctggtttctttgttgccatagtggcctcgatagctaatagaaagtgaggccaattttagggggaatgctaaactaggtcaaagaatgatgtgtttttttgcgcataaaaggaaatcaatatgctatttttacggttttagaagtagcggcaacttgtagcttaaaaatcttacattaaaataaaattaattcatttaatgatttaagtaattcaattgcttgccgataagcagttaataataaaaatttgatgccgttggtgtcgtgtatttgttcctctggaggggtatgtggatttagcaaccataataggtattcttggtgccataggcttaattgctatgtcgatggtattaagtagtgacggccaagttgcaatgttttataacacgccttcggtggtcattgtatttggtggttcgatttttatcgtgttatcgaacttcactatggggcaatttttgggcattggtaaggtcgctgcaaaagcctttatgttcaaaattgaatcgccagaagaattaattgaaaaagcagtagaattagctgactcagcacgtaaaggtggtttcttagcattagaagaagccgaaatccctaacggctttatgcgcaaaggggttgatatgttagtggatggtcatgatgctgatgtagttcgtgccacactgcaaaaagatatttccctcaccgctactcgccatgaacttggtgcaggtttatttaagtcgcttgccgatatcgctcctgcgatggggatgataggcacgctaattggcttggttgcaatgttatctaacatggatgacccaaaagcaattggtcctgcaatggctgtagctcttttaacaacactttatggtgcttttttggcaaacgttgttgcaattccaattcaggtaaaactagagctgcgtaaagatgaagaagccctcaaccaacgtttaattcttgatgcggtactgggtattcaagatggtcaaaacccgaaagtcatcgaaggcatcttgaaaaactatttagctgaatcaaaacgtaaagtcgataccgaggagtagggcatgtcagatcaagagtgcaaatgtccacctccggggttacctgcctggatgggaaccttcgcagatttaatgtcgctattaatgtgcttctttgtactcttgcttgctttctcggaaatggatgttcttaagtttaagcagatagcaggttcaatgaagtttgcttttggtgtacaaaataaaattgaagtaaaagatattccaaaagggacctcggtcattgcaatggagttcactccaggcaaacctgaacctactcctatcgagacaattcaacaacaaaccgtagagatgacacaacaaatgctcgagtttcaggctggtgatgaaagctctgcaggtggtcgtcaagaacagcgtggtaataagcgtggtggggaatcacaaagcactgctcagcaacaagcaatggagcagtcaatttctgcagcagatcaagagcaaacgaatgagcttgtgaagaaaattgcccaacagcttgagcagcaaattatggatggcgcgattgaacttgagtcactaggtcaacaaattatcattcgcattcgtgagaatggttcattcccatcaggcagtgctttcttacagcctaggtttaaacctatcattcgtgatattgctacgctgttaaaagatgtgccgggtgaaataaccgtgtcagggcatacagatgatttccaagtatcgaatgagctttatacaaacaattgggatttgtcgtcaaaacgtgctgttgcagttgctagcgaaatggaaaaggcccccggttttgataaatctcgtatgatggttgtaggtcacgcagaaacaaggccacttgtaccgaatgttaccgatgaagatcgtaggcgtaaccgacgagtcgagatctctattatgcaaggtaaggcgcatgaatctgagcctattgatgtgaggcaataaatcaattaaagtgaaacttcattaacagatgtaatggagtatacaaatgaaaaaagttgataaatatagctatatgccaggcaatggtgatggcggtgatgacgataaaactgattaaggcgctacattttgcctgactggtttgtagaaattagagttatcttaagcaatagctgggtgttcattttgagcccagctattattattttttatcttcgtaaagactggcctgctttttatttctctgttattactgctgcttttttcctttatggaactcttatttattctgctttaaaagaatttgatgacatttatatctggcgctatgtagtctgggcttttaatgatattgcttggatggcaatcattgcttatttaggtattaaagacaaagtctacttatggcaaagtgtgttgggacaacttgttgttattatggcgccaattttacaactgttccgtttggtcgaccgccatctttgggatttatcatacagtacctacatgtataagaccctgctaccgctaatcaatattggtactgtggtcgtttgttacctaccacttatctatctctttactcgacgaagtcagcaagcttaagcgattcctaagttaaaaatcctgtgctagactactgtttataaaaacagtatttagtgttactttatgaaactttacattgccgaaaaaccctccctagcacgggccattgcagatgcgctgccaaaaccacagaaaaaacaggatggttatatagagcttgctaatggtgattgtgtttcttggtgtgtagggcatttgcttgaacaagcagagcccgatgattacgatgcaagttttaaaaagtggcgatttgagcacttacctatcgtgccagaacaatggcaattaaaacctaaagcaaaaacccgtaaacaactcactgtattaaaaaagctaatcaagcaggcaagtatcatagttcatgcaggtgaccctgaccgtgaaggccagctattggttgatgaagtaattgatcaggtcaaactaagccaagctaaaaaacagcaaattcaacgactcttgatcagcgatttaaacttaagtgcagttaaaaaagcactcaataatttaaaatcgaatcgcgattttattcccttaagtgtatctgctttagctcgctcgcgtgctgattggctatttggtatgaatttaacgcgagcttatacgctagctgggcaaaaagctgggtttggtaatgtgttatctgttgggcgggtacaaacacctattttaggcttagttgtaaatcgtgataatgaaatagcgaactttgtagcaaaacctttttatgaagtattagctcatcttgaaactgagcagcagcaaactttttctgctaaatggcagccaagcaaagcatgcgaaccttatcaagatgaagaagggcgggtattacatagaggacttgctgaaaatgttgtgtcacgaataactaatcagccagctaaagtagttgagcttgagcaaaagcaaaaaaagcaacaagcgccgctaccttataacttatcagctttacaaatcgatgcggcaaaagcgttttcaatgcctgcgcaaaaggtgctcgatacctgtcaaagtttatatgaacgtcataagttaattacttatcctcgatcagataatcgctatttaccaaaagagcaccataaagatgcagctaaaattattgctgctattgctagtaatgaagggcaagcaagtgaagcttgcaagcaagctgatacgagcaagcgtagtaaatgttttaatgacagcaaagttgcagctcaccacgcgatagtacctaccgaaaaacaacttcgctcagcaacattaaatagtgatgaacaaaaagtctatcggttgatctgtcgtcattatttaatccagttttatccagactatatatttaacgaaaccaaagtaacggttgaaattgcaggtgggctttttaaagcagctgctaaacaagatgttagcctaggctttaaaacattgatgggcaaaacagagttaaaagatgagcaaaccttgcctgctcttgaaaaaggtcagttgctgcattgctatcaaggcgaagtgatagacaaaatgacgacaccgccagcgcattttactgatgctaccttattaagtgctatgacaggcatcagccgctatgtgaaagatcctgaaattaaaaagatccttaaagaaaccgatggcttaggcactgaggctacacgggcaggtattcttgagcttttatttaagcgccgctttttagagcgtcagggtaaaaacattttagcaacggcaacaggaaaagcactcattagtgcattaccagagcagcttgctagccctgatttaacagctaagtgggaagcatcattagggaatatagctgagcaacacatgagttatcagcagtttttaaagccattactggcagagctgcatgctttagttgagcaagcaaagcagtgcgacagtcaagtattttcccaattaccaaaaacgccgcaaaagcgacgttttaaaagaaaagctaagcctagagctaagtcagcctaaactagtttttgttgaacagggcaactgcggcgttactcatagctgttatgcctgtaggaagcgcctttttgtaatcaggtgcaaacttacttgagtgtaaagaaggtaatgttgcaccagatttcattgctgcatcatattgactcggttcaacaccgcctaaccaaaacaaagtaattggcacatgttgttctgtacgaccatatagaccaaagtcctcaccagccattacggcttcagtttcaagtacattgtcttcaccaatagcattagcaatggctgaacgaactaagttggtttgtgctgggttattgtaagtagaaggaattgattcatcttcatgtacaaatacttcaggagctaagctttcatcaagtccggcacttaatgcgatgcctttagaaattcgtttaatcgcagcgatttgttgcaagcgtacttcagggttatagctacgcagtgttaattgcagttttacttcatctgaaatgacattgtgtttagagcccccgtgaatagaacctaccgtgataaccgatggttcaagtggtgacaattcgcgactagtaatagtttgcagcgccaacacaatacgtgaagcaattacaacagggtctattgttgtgtgtgggtaggcaccgtgaccgcctttaccttttacagtaatatcaacagagtcaacgcttgccatcgtatattctgttttcatgctaactttgcctgcaggaacactggcactaacatgtaaaccaataacatggtctggagtagggtacttagtaaatagcccttctttcagcatggcttttgcaccgcctcctacttcttctgctggctgtgccaccatcattagagtgccttgccactgatctttgtgtgtcattaactgttgggctgtgccaataaatgaactcatgtgaatatcatgaccacagccatgcattacgccaacggttgcaccagcatcattagtgacagttactttagaggcgtatggcttaccagtttgttcaacaattggtaagccgtcagtatcagtgcggatcatgaccgtagggccatcaccgttcttatatatcccaacaacgccgtaaccacccacattatctgtaacagtaaagcccagttgttttaattgctttgctaacttttggcccgttttcttttcgtggtatgacaactcaggagattgatgcaaatctaaatagagatcttcaatctcaggcatggttttttgaagatttaaatcgagcgttgttgcttgcgcgaatggactaagaagtaataaagctgcagaaatagcagataatttcataatgacctcgacccgtaggacttgtaattgttatgtttgccactatatcaaaacttaaatacttatatagtgcaatcaatcaaatgaataatatgataaatcttaccccgcaaaatttgcagcaagcactgggtgaaacgtccgctgaaaaattagtgttacttactttttactctgcacaaaatccagagtgtcatcaacaagctgctattttagagaagatcgcagatgaatatggtgagcatttattagtagcaacgttagattgtgatgttgagcaggcacttgcaagtcaacttgcacagcaaataggtttgcaagcactacccactcttgtgatgttaaaagactcagcgcctgttgatatgttacctggtgctcaaacagagcagcaaattcgtgatgcgttagcaaagcatttacccgcacaacatgaattattacttgagcaagctaaacaagcgttaattaatcaggatttaaataatgcatttagttatgcaaagcaggcatacgagctagatccaaaccatactcgtgtaaagttagtgttagctgatatctgtattcaaattcataagctagatgatgcgcaagcattattagattcggttgcagaaaatgaacgtgatgcgtatttcacaaatatccaagctaaatgtgaacaagcgttagcagcaacagattcaccagaaataaaagcactacaagcgaaagtagaaaaatatccaaatgatcttgagataaaactagagctaagcaatgccttaaacattgcaggccgcaaagaagaagcacttgagatgttatttactgtgcttaaaaaagatctaaattacgcggatgcaaaaccaatatacctagaaatcattgcctctttacctgatggtgatgcactcgcttctaagtatcgccgtaaattatatagtatcttgtactaaatctagtgttgattgataaaagcgccacttaaatacaggcgcttttttatttaaaaaaacttgcgtattacctaatttcgataatacttaagatcctctcgagaaaagttggctgtattttatacagtaaactatgttttttactgcctttagcttgttttttgcgcgaaaggtaagtttttagtagttttctacaaaaagtgcttgcgttaattcttcgcatccctataatgcgcatccactgacacggcgggcagcaatgaaaagcgctgaacaaactgacagagagtcaagtaaaacttcggtttaaaacggtctaaaaagaaagtttaaaattaagtgttgactcaaaaaattaaggatgtattatacgcatccctcgagacgcgaaagtaactcgaaacgttctttaacaatataaagcaatcatctgtgtgggcactcgtacagattgagttctaacagcagattctagttcgctagatgacgcaaacaaatttagagtctcaattgaactgagtgaccaacggaaacaagttacttgtttcagcacagtcaattcgatatcgaaagatatcaaaattcagaattcattgagcatgtccttcgggacagaaaaaacttttaattgaagagtttgatcatggctcagattgaacgctggcggcaggcctaacacatgcaagtcgagcggtaacagagagtagcttgctactctgctgacgagcggcggacgggtgagtaatgcttgggaatatgccttatggtgggggacaacagttggaaacgactgctaataccgcatgatgtctacggaccaaagtgggggaccttcgggcctcacgccataagattagcccaagtgggattagctagttggtgaggtaatggctcaccaaggcgacgatccctagctggtttgagaggatgatcagccacactgggactgagacacggcccagactcctacgggaggcagcagtggggaatattgcacaatgggcgcaagcctgatgcagccatgccgcgtgtgtgaagaaggccttcgggttgtaaagcactttcagtaaggaggaaaggttaagtgttaatagcacttagctgtgacgttacttacagaagaagcaccggctaactccgtgccagcagccgcggtaatacggagggtgcgagcgttaatcggaattactgggcgtaaagcgtacgcaggcggtttgttaagcgagatgtgaaagccccgggctcaacctgggaactgcatttcgaactggcaaactagagtgtgatagagggtggtagaatttcaggtgtagcggtgaaatgcgtagagatctgaaggaataccgatggcgaaggcagccacctgggtcaacactgacgctcatgtacgaaagcgtggggagcaaacaggattagataccctggtagtccacgccgtaaacgatgtctactagaagctcgactcttcggagttgtttttcaaagctaacgcattaagtagaccgcctggggagtacggccgcaaggttaaaactcaaatgaattgacgggggcccgcacaagcggtggagcatgtggtttaattcgatgcaacgcgaagaaccttacctacacttgacatacagagaacttaccagagatggtttggtgccttcgggaactctgatacaggtgctgcatggctgtcgtcagctcgtgttgtgagatgttgggttaagtcccgcaacgagcgcaacccctatccttagttgccagcgattcggtcgggaactctaaggagactgccggtgataaaccggaggaaggtggggacgacgtcaagtcatcatggcccttacgtgtagggctacacacgtgctacaatggcgcatacagagtgctgcgaacctgcgagggtaagcgaatcacttaaagtgcgtcgtagtccggattggagtctgcaactcgactccatgaagtcggaatcgctagtaatcgcatatcagaatgatgcggtgaatacgttcccgggccttgtacacaccgcccgtcacaccatgggagtgggttgctccagaagtggatagtctaaccttcgggaggacgttcaccacggagtgattcatgactggggtgaagtcgtaacaaggtagccctaggggaacctggggctggatcacctccttatacgatttagaacttatttgttcgtagtgtccacacagatgattgttagttagctaaaccgtttggtttaactaattaatatgctctttaaaaatttggaaagctgatattaaaattcttatagatacttgtatctataaagagttttcaaaagtaaaaatatgccagttaatcagcaatgattaatcggtatctactttagtattctcatcattatttgatgaattaacttctggcgaagttaacagctgtcactaacaaagacccgtttgggttgtatggttaagtgactaagcgtacacggtggatgccttggcagttggaggcgatgaaggacgtattaacttgcgataagcctagtcaagctagtaaaaagcgcttgagactaggatttccgaatggggaaacccacctgcttgcaggtatcttgcactgaatacataggtgtaagaggcgaacgcggagaactgaaacatctaagtacccgtaggaacagaaatcaaccgagattccggaagtagcggcgagcgaaaccggaccagcccttaagcttattatgtgttagtggaacattctggaaagtttgacgatacagggtgatagtcccgtacacgaaaatgcatcttaagtgaaatcgagtaggtcggagcacgtgaaactttgactgaatataggtggaccatcatctaaggctaaatactcccaactgaccgatagtgaaccagtaccgtgagggaaaggcgaaaagaacccctgtgaggggagtgaaatagaacctgaaaccgtgtacgtacaagcagtaggagcccacttgttgggtgactgcgtaccttttgtataatgggtcagcgacttatattttgtagcgaggttaaccgattagggtagccgtagggaaaccgagtcttaactgggcgtatagttgcaaggtatagacccgaaacccggtgatctagccatgggcaggttgaaggttgagtaacatcaactggaggaccgaacccactaacgttgaaaagttaggggatgacctgtggctaggagtgaaaggctaatcaaaccgggagatagctggttctccccgaaatctatttaggtagagcctcggacgaatacttacgggggtagagcactgttaaggctagggggtcatcccgacttaccaaccctttgcaaactccgaataccgtaaagtactatccgggagacacacggcgggtgctaacgtccgtcgtgaagagggaaacaacccagaccgccagctaaggtcccaaagtcatagttaagtgggaaacgatgtggaaaggcccagacagccaggaggttggcttagaagcagccaccctttaaagaaagcgtaatagctcactggtcgagtcggtctgcgcggaagatgtaacggggctaaactatgcaccgaagctgcggattcaaactatgtttgagtggtaggggagcgttctgtaagccgttgaaggtgacccgggagggttgctggaggtatcagaagtgcgaatgctgacatgagtaacgataatgcgggtgaaaaacccgcacgccggaagaccaagggttcctatcccatgttaatcagggtagggtaagtcgacccctaaggcgaggccgaaaggcgtagtcgatgggaaacgggttaatattcccgtacttggtataattgcgatggggggacggagcaggctaaacaagcatggcgttggttgtccatgtgaaagtgagtaggttggtgacttaggaaaatccgggttgctaagactgagacacgagacgagccactaaggtggtgaagttgttgatgccatacttccaggaaaagcctctaagcttcagattataccgaatcgtaccccaaaccgacacaggtggtcaggtagagaatactaaggcgcttgagagaactcgggtgaaggaactaggcaaaatcgtaccgtaacttcgggagaaggtacgctcctatctgtgatgagacttgctctctaagcggacgggagccgcagtgaccaggtggctgggactgtttattaaaaacacagcactgtgcaaaatcgcaagatgacgtatacggtgtgacacctgcccggtgccggaaggttaattgatggggttagttttcggacgaagctcttgatcgaagccccggtaaacggcggccgtaactataacggtcctaaggtagcgaaattccttgtcgggtaagttccgacctgcacgaatggtgtaaccatggccacgctgtctccacccgagactcagtgaaattgaaatcgcagtgaagatgctgtgtacccgcggctagacggaaagaccccgtgaacctttactacagcttggcactgaacattgaccctacatgtgtaggataggtgggaggctttgaagcagagacgctagtctttgtggagccgtccttgaaataccacccttgtagtgttgatgttctaacgttggcccctaatcggggttacggacagtgcctggtgggtagtttgactggggcggtctcctcccaaagagtaacggaggagcacgaaggttggctaagtacggtcggacatcgtacggttagtgtaatggtagaagccagcttaactgcgagacagacacgtcgagcaggtacgaaagtaggtcatagtgatccggtggttctgaatggaagggccatcgctcaacggataaaaggtactccggggataacaggctgataccgcccaagagttcatatcgacggcggtgtttggcacctcgatgtcggctcatcacatcctggggctgaagtcggtcccaagggtatggctgttcgccatttaaagtggtacgcgagctgggtttagaacgtcgtgagacagttcggtccctatctgccgtgggcgtttgagaattgagaggggttgctcctagtacgagaggaccggagtgaacgaaccgctggtgttcgggttgtcatgccaatggcactgcccggtagctacgttcggaactgataagcgctgaaagcatctaagcgcgaagcaggcctcgagatgagttctcactagacttttaaagtctctgaagggccgttgaagactacaacgttgataggcagggtgtggaagtggtgcgagccattaagctaacctgtactaattacccgtgaggcttaaccatacaacgccaaacgcgttttatgacagcgtaacagacagaagttaagaaactaaagtagacatttacttgatatcagaattccagattttagttaattgccaaggcgattaacgacccaaatttgcttggtgacaatagcgttttggacccacctgaccccatgccgaactcagtagtgaaacgaaacagcgccgatgatagtgtggcatttgccatgtgaaagtaggacatcgccaggctccaaattcagtcgcaagactttaaattaaaaataataagaaaattgaacagaattttcttggtgacaatagcgttttggacccacctgaccccatgccgaactcagtagtgaaacgaaacagcgccgatgatagtgtggcatttgccatgtgaaagtaggacatcgccaggatcctaattaaagaaagcccgattcgaaagagtcgggcttctttgcgtttaagctgatagctctctgtgttgggtttcgctgcgctctacccaacctacgccagagctttaaaactttcctctttctaactttactctcgctaactcactacaaaccacagtgccccttgcttccctaacgttgttatgcgataaagcgtttatatttgtaatacaattagggtttactgtgtctcgtaagaaaacaaccaagtcaaaaggttcttcagggttaaatcgtaaaaatagtgaagcattcatcgctaagttctcatctcatcctgatacgcatctatgcccatcgggtttaatgtataaagtgattgatgatgttgcaggggatcgcgtgacagagttcgatacagtggtcattaatcaacgtattatgcttgctgatggcagtgtcattgccgacagttataaagcgggtatgccagaggtgtttgctttatcagaagctatagaagggttacgagaaggtttgttattaatgaatatcggctctcgctatgaatttgtgatccccccagagcttgcttggggtaaaaaaggtaacggcggaaaaattggtgcgaacgcagtgctgcattttgacgttcggttgatgcgtttagcttaattcttctcgcataagtcctttagcataactcgacagagtatttgaaacgcgttaacgttcactactggttactgaggaacattatggacgcatttacttcacgagtttattttcttcgccatggcgaaattgccacaccgggtattctttctgggcaaatcgatgttgatttatcaaagcatggtcttgaaaaaatgcgccaagcctctgctgaactgttgaatttaaatgctatatatagctcaccgctaaagcgttgctcagtctatgctgattttttagcaaatcaacacacattgaatgttcagtatttcaatgcgctgaaagagtttaattttggtgattgggatggccaagactatcagcagctttggcagcaaaccagtaaacctcatatcggtgatttttggcagcatccttggcaggtaaaagtacccaatggtgaatcaatggctgacttttacgcaagggtagaagcttggtggcaaacgtttttaaactcattgagtgaaactaaacatactcagtcattggtaatcagccacgctggtgtgattaaacaaattcttgctattgtttgccagatgccaaaacagtcagccacgcatttaaatgttttccacctcccttatgcgggacttgttacactcgatgtatatatagatgaacaaggaaaaacttggccaaaaattgttttttagccatctagagtgatattcattgaattatttacttagcccgccataatacacatatgctatggaatggagtgaaattctccagctgttcccgcaactgtaatccatcataagtatggtcagccagatacttagcactaacaattaatcatcgagcgggtaaactcacgtcattttctggtacttatcagtgctttcttgtgcgttgtggttgctcgccaagagagaacaagcttgcaacaaactagccacggctctgcgccattaatatcagtctctgatttaagttggggtattgcgaataaaacaatacttaaatcaattagccttgagttaaaagctgggcagtttataggtttacttggccctaatggtgcaggtaaatcaagcttactgcgttgtctttatcgttacttgaaacctcaacaaggggctgtgttgctaaacggtgaagatatctggcaaatcaatgctgatgagtttgcaaagcaggttgctgtagttttacaagagtctccatcgcagtttaatttgtctctgttcgacgtggtgagtttagggttaacacctcataagcgacttttcagcggcacgtctatcaatgataagcagcgaatatatcaagcgattgagcaggttggtttgtctcatcatagtgagcaagcattcgactcgctctctggtggtgaaaagcaaagagcactcattgcacgctctatcgtacagcaacctaagcttttgatcatggatgagcctaccagtcatcttgatgttaaataccaaattcaaataatggaattagcaaagtccctcgatgtgactgtgcttgcctcttttcatgacttaaatctcgcagcgagtttgtgtgatgaattactggtaattgacgaagggcaattggtttgtcaggggcaaccaaaagcggtgcttactgagcagctgttgagcgatgtatttggtgtctgcgctgcggtgtctgctcatccgcaatcaaacaccgataagtttatcccgcatataacttatttttatggctatcagacacaggagcatcaaaatgactgatgcaatgcgtttaagtatctgtgctgttgttgggcttattagttgttttttcgctctgagctttggtgctgcaaacacaccattgagtgaggtacttaatggcttgtttagccaaggcggtgatgaattcgtgcagcgaattatttggcagttacgcatgccaagaacggtgctggcatttttagcaggatctggactggctcttgcgggattaattttgcaaaccgtaacccgaaacccgcttgctgacccttacttgttcggtatctcttcaggagcttcatttggtgtggtgtgctttatagcccttactggtgcgggctttggcttaagcatgtcggtagctgcgtttgtagggagcttactctcaatgctgttgctcattgctattgctgggcgtcgacatgttggtcaagttgaagccatgttacttgccggcgttgctttatccttcttatttagcgctctgactagcctgctgctttattttagtgatcctcaagcaattacagctattttattttggacaatgggcagtttttctcgggcgcagtggggcactctttggctgccgtttaccgttattattgcctgtatgactttgatgattgcatttcgtcgtcagcttaatgcaatgctacttggcgatgaaagtgctgcgactttggggattcatgtccaacgctttcggatcatgatgctgctgctaagttcattaattacagcggtgcttgttgctctgtgtggaggcgttggttttgtaggtctgatgatcccgcatattgtgcgctacttttcgccgcaaggcagcagtcataacttagtcatgacatccttggttggtggcatttttatggtgtgggtagatgtgttatgccgaaccttattgaataaccaagaattacccgttggtgtgatcactgcagctatcggcagcgtgttctttttattcttactttattttcgtaaacagagcaggtagctaatgtttaatatcatgccaattaaccagcagttttcagctgtaatacaacaaaagatagaccttaaaacgaagccgcttggtgccttaggtcagcttgagagttgtgctaaacaattaacgcttattttttcaaagcagcttgatagtgagcaggcgctacttgcctttaaaccagttatttcaaagccttctctggttgtatttgcaggcgatcatggtgtggcaagccaaggtgtgtcaattgctcctagcactgttacatcacaaatggtggcaaactttgcagctggaggcgctgcaatcaatgtattttgtcgccagcttggttggcagctcgaagttgtcgatgccggaacactcactacagcacatgataaaagtgtgcataaccagcgtttaggtgaaatcactgccccactgaatactgaaatggccatgtctcgtagtcacgttgaaaaagggtttgaattagcaaagcagcgagttcattcactctatgagcaaggcagcaatactattgcgtttggagagatggggattggcaatactacaagtgctgcggcattaatggctgctttgttgtccttacctgccaaccaatgtgttggtaaaggcacaggtgtgagtgatgaggttatagctaaaaaaattaaggttgtagagcaagccctccagttgcatcaagctcattttagcgacccattaatgacactcgctgcattaggtggttttgaaattgttcagatcaccggcgccattttagctgctgctgaacttggcatggcagtggttgttgatggctttatttgtactgcagcggcgcttgttgcaactcgcattaatgcaaacgctcgcgattacatgttatttgcccatgcctctgatgagcaagggcacaaaacaatgcttaatgccatgcacgcatcacctttattacagctagatttacgtttaggagaaggcacaggtgctgcgcttgccttacctttactgcaagcatctttggcgttttacaatgacatggcaagttttgccgatgccaatgttgagcaagtagtttgatatgagcacggaacaacacacttcaaacacgaccccaagtcagcttcagttatttttactggcgctcagctttttaacgcgtatacccgttaaattaaactttgcagtatcgaataaggcgctcaatcaggccagccgttattttgcattggtcggagtattattaggcgcaattttagcgttaaactttttgctgctaagttggttattcaccgcagccattgcagtcgcgttagttatggcgtttagcttgataatcacaggggcatttcatgaagatgggcttgctgatgtctgggatggctttggtggcggttggcaagttgcagataagctcaacattatgaaagatagtcgcttaggcacctatggtgctgcggcgcttgtgatggctttattagttaagtaccaaacacttgtcgcacttagcgaagtaaccagtgctctgattattgcacttgttttaggacaaagcttaagccgggttgtagcaacaagtttaattgcagatatggactatgtaagtcaggacgccacatctaaagtaaaaccaattgcgatgtatttaagcacgcaaagttatcaaatactgctagcaactggctttgctgtgttagcaatagcatggttgttttttggcttcactctagggcaattattaatactcgtcagtgtgctttttgttactcgtttactattgaagcgctggtttgaaaagcagttatctggctacaccggtgattgcttaggtgctgcccaacaagtatctgagcttgttacctacttatgtctagtgagtatgttatgagccaatcacacaccttaattttaggcggtgctcgcagcggtaaaagccgttttgctgagcagctggcaataaattcagacaagccgcttatctacattgccacagcaaatgcgggtgatgaagaaatgacagcccgaattaataggcatcaagcagagcgcgctaagcattggcaacttgtcgaagagcctttgtatttggctaaagcactacaactacatagccaagctgaaaactgtattttagtggactgtttaaccttgtggttgagtaattgcttatgccagcagggtgaagcattttggcttgagcaaaaagcggccttactcgatgtgctatcgcaattgcccggtgaggtgatttttgtcagcaatgaagtgggtcatggcattgtgccgctcggtgaattaagccgtcagtttgttgattattcaggttggttacatcaagccttagcacagcaagttgcacgtgttgagtttgtaattgcaggtcttgcacaaactttgaaaagagaacaatgatgaaaacattaatggtgcaaggcacaacttcagatgcaggcaaaagcacccttgttgcagcactttgtcggatctttgcagagcgaggcattaaggttgcaccttttaagccacaaaatatggcgttaaatagtgccgtaaccgcagatggtggcgagataggccgagcacaagctttgcaagctgtagcggcaaaagtgcccgcagaagtcgattttaaccctattttattaaaacctaacagcgataccggggcgcaggtaatcgtacatggtaaagcgctttcgaatatggaagcggacagttatcacgactacaaaaaagtggcgatggatgcggttcttacttcgcagcagcgtttaagtgaacgttttgaattactggttgttgaaggtgctgggagccctgcagaaataaacctgcgcgaaaacgacattgccaatatgggttacgctgaggcggtagattgtccggtgatcattatcgccgatatcgacaaaggcggggtatttgcccatttagttgggacgttagccttgttgtctgactcagagcaggcgcgcgttaaaggctttgtgattaaccgttttcggggtgatattgcgttattgcaaggcggtcttgattggttagagcaatacaccaataagccagtgcttggggtgttaccttatttacatgacttagcactagatgctgaagatgccgttgctataagcaatcaggtagataaaccacaattgcgcatagcagtgctattgctacctcatattagtaatcacactgactttgatgcactgcgattacaaccagaaatcgatttacagtatgtacgtcatacccagactattccaagtgttgatctgattattattccgggcagtaaaaatgtccttagcgacttagcgtttttaaaaaatgaaggttggcacacacaaataaaacgtcatttacgctatggcggtaaagtgctcggagtatgtggtgggctgcaaatgttaggcaactatcttgctgatccacatgctgttgaatccaatttaggcagtgcagaagggctagggttggctgactttgaaacgcagttagggcagcaaaaagtactaaaccaagtcacaggcatgcttcatttaaatcgtagtggtaaaacaatttcaggctatgaaattcacgctggtataagccaagggcccgcacttgaaaggccattcttgagttttaataatcacccaagtggatttaaagtggatggctttattagtgatgataaccaaatagcaggtacttacttacatggcttgttcgatacgccagagggagtagctgagctaactacttggcttgcagcaaatagccaaataaagccgattgatattaacttaaaccgtgaacagcagctaagccgtttagccaatgtggtagcagagaatcttgatattgaacaaatcatcaatatttatgagaacttcaacttagagtcataaggaacaacaatgagcgaacagaatcaagataagcaccaacagcgccagcaaaaagtaaaagaaaaagtcgatgaacgtattgctgctgcgcaaaaagagcaaggtatttttcaggtcataactggtaatggtaagggcaaatctacctctggatttggtactgtcgcacgtgctgttggtcacggaatgaaagcagctgtgtgtcagttcattaaagggacttgggagtgcggtgagcgtaacctactcgaaaaagcaggggttgaatttgttattatgaacaccggttttacctgggagacacaaaacaaagagtcagacaccgcagctgcccaagtgacatggcaagaagcgaaaagaatgctcaaggatgagtcgattaacctcgttatgctagacgaaataacctatatgatcacctacggctatattgacttagacgaagtactagaggcagtaagctctcgaccagccatgcaatcggtgatcattacaggacgtggtgcacaccgaaaattgaccgacttggctgacacagtcagtgaagttagaaatgtaaaacatgcttttgatactggcattaaagcgcaaaaagggttcgattattaacatgaaaaccatcaagtttgcactcttaggttttttattaaatttacccgcacttgcacacgctcatgaaattaaagagccacagcgtattgttgctttagcaccgcacattgttgaaaacctgtttgcgataggtgctggcgatcgtatcgttggtacggttgattttgctgattacccagcacaagcgaatgatattgaacgtgttggtgggtattacggcgtcaatatggaaaagttactgtcacttaagccagatcttgttttagcgtggaagacaggaaataaagctgatgacctcgcttatatcgaaaagctaggtattcctgttgcttatagtaatccggatcaagttgataatgttgctgatgaattacgtaagctcggcacgcttacgcatttacaaactaaggcagataaggtggccaatgagtttgcagctaaactcaatgcaattcgtgcctctcagcaaggtaaaaaagccgtgcctgttttttatcaattatggccagagccgatgatgacaattggcggaaatacctggatcaatcagcttttaactatttgccatgctgagaatgtgtttgctaatagcgatactgattacccgcgcattagtattgaaaatgtattggttgctaaacctgaggcgattattattccagacgaaaaaactaaaaagccgcaaccgaagatagactggcgtcaatggcctgaactgccggcagtgcagcataaccagtttattagtgtgaacgcagatctattgcatcgttttacaacccgtatgctagatggtttaagcgatatgtgtggtaaaatagacatctctcgtcagcaaatacaggcttcaaaatgatcgattggcaaacatttctagataccgagcttgctaaaccctacatgcaagaaaccttgcaatatgtagctgatagacgcgcagcaggtgtgaccgtttatccaaaagatgagcaggtattctcagcttttgatgccacatcactgagcgaagtcaaagtggttattttagggcaagacccttatcacggagaaggccaagcccatggtttgtgtttttcggtattgccgcaggttaaaaaactaccgccatcattaaagaatatatacaaggaactagccacagatattgatgggtttgagataccccaccacggttacttgcaaagttgggcagagcaaggggtgtttttacttaataccgtacttactgttgaacaagggcaggctcattctcataagcagcttggctgggagcaatttaccgatgcagtgattgcgcttattaatcaacactgtgaaggtgtggtgtttattttatggggcgcacatgcacagaaaaaaggtaaacacattgatacctcgcgtcatcatgtgatccaaggtccgcatccgtcaccgctttctgctcatcgaggtttttttggttgtcagcacttttctaagacaaaccaaatacttattgatcaaaacaaaaaaccgatcaattggtcattaccacaaattttataacagaaacgtaaaaggcccataataagggcctttattttacaaaaaatctaattcgtctatgtcaatactatcagtaaagtaatcaagctcctttagttctttacgtaatctgtgtttatcttttaacgcttcgatttcgcgccattttctttttttattttttgtggaggtcttttttgttttaccaggaccttctaatatttctaaaatatcgtctaggctatccatgaacttctcccatttattttttgaacctcggaaatacgtataccataggcaaggtaaaaatagaacaaaaaagtgacgataatgttacagaactgtgattgatagatgaatagatcaaggaattagttattacagaaacaaaaacgccaccgggcggtggcgttttaaaaaatgctgtaatttgaattacattgctttaaaacgagcttctaattcaatttgtgcttctgcgaacgagcgaataccttcagcgagcttttctgttgccattgcatcttggttatgtaaccaacggaactggctttcagtcagtggtgctggtttttcttcaacagtaaagttgttatctagcaggtattcttgtgcatcagttagttggcctagctcttctaaaagtgcagggctaatggttaacttatcacaacctgtaagcgcgatgatttcgcctgtattacggaagcttgcgcccattaccactgttttgtaatcgtgacgtttgtagaattcgtagatactacgaaccgattgcacaccaggatcgttcagtggatcagttggtttttccataccgttagcaacatgccagtctaggatacggccaacgaatggtgaaattaaaaatacgttagcatcggcacatgcgcgagcttgtgcttcagagaataacagcgttaagttacacttagtgccttctttctctaattgctcagcggctttgatgccttcccacgttgatgcaactttgatcaggattttatctttgctcacaccttctttttcgtacaggctcaataaagtgtgggctttatcgattgtcgcttgcgtatcaaatgataaacgcgcatctacttcagttgagatataacctggaacaatttcactgatttctttaccaattaaaacagcaaagtaatcacaagctagctcaagttgtttagctgcatcttgctcggtttctttggcatattgccacgctttatctaaataaggcttgtacgcttcaatttcactggcttttaaaagtaaagacggattagttgtcgcatcttctggttggtgctttttgatagcttcgatatcacctgtatctgcaacaatagatgaatgctgtttaagcctttgtagtgctgaagtcatttgctttcctcattccaagcaagttaaaagaatatccattatagccacctttatgctgcaacactatgacagtgtttaataggtcaaatgtccttaatatagaaaactagaacattatgtatgaaagagcagcggataaaggcaggacgaaacaaaacgtgcattttgattcaattaatgttgaaattgacatcaaataaattacaagtcaatagctaagtatgatcactgttatttcacctgcaaagaatttagattacgaaaccccagccacgaccgataaattcactcaacctgaattactcgagcatagcgaagagttaatgtcagtttgccgtgatttaacaccagcgcaaattggtagcctaatgaaaatcagcgataaactagctggtttaaacgcagcacgattcgccgagtggtcgcagccattcacgcaagataacgcaaaacaagccgtgttggcttttaatggcgatgtgtacggtggtttagatgcacaatcattaaccagttcagacctcgattacgcgcagtcacacttacgtatcttgtctggcctttacggtgtgctgaagccgttagatttaatgcagccttaccgtcttgagatgggtactaaacttgaaaacccacgtggtaaaaacttgtatcagttttggggcagtgtcatcgccgaaaagcttaatacggtacttgctgagcaagatagtaagtatttagtaaaccttgcttcgaacgagtattttaaagcagttgataaaaaagcgttaaatgcgcaaatcattacgccgcattttaaagactgtaaaaacggccaatataaagtgattagcttttatgcgaaaaaagcccgcggcatgatggcgcgttacatcattgaaaataaaattacccaattgagtgatttaaaagatttcaccgttgcaggttattactttagtagcgatgcaacagcaaaagaattagagcctgttttcttacgtgaagagcagaactaatttttagcaaaatgaattagagaagccgtgcttagcacggctttttttatggttttaatacacccaattagaaatggctcttatcttgcaaaataccctgttgagtaattaattcatcaaggtataaaaatgttaaaaattccgacagtaagtgaagctgaaaagctaatagaagaaaaactcggtggctggattgatatcatcataagccatattccaaactttattgtcgcagtagttataaccattgtattttcattgctggcgcgtcttgttggttcaatgctcagaaagctattacgtcgctcattagagtcttcgcaaatagcggacttaatgtcatcaatagcaaaggttattgtgctatgtgtaggcttatttgtagcccttgatttcttggggcttagaggcacagtcacctctttacttgctggtgctggtattgttggtcttgcgattggttttgcctttcaggacatgacagagaaccttatagcgggtattgctatgggtattcgcaaaccatttaaaactggcgatgttattcgcaccgaaagcgtgtttggtactgtacgggcgattaaccttagaaacaccctcattgagaatttttatgggcaacttatattagtgcctaacaagattttatttagaaatatactcagtaactacagtaccttaggtgtgcgtcgtatcgaagtgcctgtgggtatttcgtatgccgatgaccccgagcaagccgcagaggtgattgttaaaaaaatcaatgagtttgattttgtaattaagcaagaagagaccgctgtttacgccgaaagctttggtgatagcagcgttaacttattggtttggttttggattaaataccccggcgaagctgatttcatgacagtacgccacaaggctgttgtggcagtcagaagcgccctaagcgaagctgacatgaccatcccattcccaattcgcacattagattttggcatcaaaggcggtgagaaattaaacgccatgataagcgaaaaacagcaggatagagacactgaaaaaccgcaaaccgatgagtaaaatttactgactcatcggcgtgatttacacagggaagtgtggttgagggggcttattcacaaagaaagtgatagtaataaagtaaagtcatttgttaattctcatataatactcaaactcctctctacttatattagctattgaaaagttcggtataacttgctttgttgctggaatagctctcgtttccaaagggaagtgccaaatattaaagtcattgttcggcattgtatcgtaggctagagaatcccaacctagaagactcgccattttacttatagctattttcttagctagctgcatctgtgccgaaggattaaaaaacaattgataactgctgttaactgcgccagttaatatgtctactgtttgtaagccccagtgatatttagaatcttccattgcaacatgatgtacttttgaagatgttggcagcttcgctaacatgtgatttgttactatctgcattacttcattttgttttgaataagaactagatttttgatctgcaaagacagttatttttgcattttttgaacggctactctcacggatgaggaaatcataagtcgtgtaaaaagctgcctcctcattgctatgccactttctataaggttgtttaaatactgctatagcatgaaatgagacaggactaattaatatgaatctcaatatatctatacataaatttatctgacccgcacttttcctaactttttcccattttatttcaccttgcaggccgcttttatcgtaaatgtcagaaatcttttgattgaattctgcgaagtagttcttgggaatggcaattatacctatcgtgtagcaggggcagccttttgaggtgccactttcatcggcaaatgcaaatatttcatccatgactcaaattccttttgactctcaataatttggttgtttataaattgcacaaataaataataaaacacttttaacaaattaactaaggaattactaccagatagttatcttcagtagctaatgttcgcgcgaaataaatttcacgcctactctaaagcatttcactacaacaaagggtatacaatcggcttatagctgaaagctcaaggcttacagctccaacattgtgctggttttcgctgcgttcaaaccagcctacgagctcctttgttaaagttttgtcctacaaaaaaagcgcaagcagtttaactgtttgcgctttttttcgatatgccaatgattagtgaaggatacgtgctctgattgtaccttcaacagcacttagctctttaagagcgacttctgattggtctgtatcgacatcaattactacgtaaccaatcgcttcgtcagtttgtaagtactgggctgcgatgttgataccgtgctgtgcgaacgcttggttaatttgcgttagaacacctgggcggttgtgatgtacgtgtaataaacggctgcggtttgcaagttcaggcagtgatacttcagggaagttaactgcagtaatggttgaaccattatctgagtatttagcaagtttgcccgctacttcaataccgatattttcttgtgcttcttgtgttgaaccaccaatgtgtggtgtcaaaatcacgttatcgaactcgcgtaacggtgatacaaactcttcatcatttgattttggctctacagggaatacatcgattgcagcaccgcttagcttgttttcacgaagtgattcagccagtgcatcaatatcaacaactgttccgcgagaagcgttaattagaatagcgccttgcttcattacttcaagctctgccataccaattagattcttcgtttgcggtgtttctggtacgtgtaagctaataacatcagcacgctgtaataactgagttaggttatgaacttgcgttgcgttaccgagtgttagtttgtcttcaatatcgtaaaactcaacgttcataccgatattttctgccatgatacctagctgtgtaccaatgtggccgtaaccaataatacctaaggttttaccacgcgcttcaaatgaaccgttggctgattttaaccaaccgccacggtgtgctagggcattacgctgtggaataccacgaagtaataataagatttcaccaagtactaattctgcaacagaacgagtgtttgagaatggtgcgttaaataccgcaataccacgctcacgggcaccttgcaggtcgacttggttagtaccgatacagaagcagccgatagcgactagcttttcagctgcttctaataccgcttcactaatatgagtgcgagaacgaaggcctacaaagtgcacatctttaatgcgctcgatgagttcgtcttcaggtaaggaagtttttacgtaatcaatattactgtagccattacgtttaagcgtttctacagcactttggtgcacgccttccagcaagagaattttaattttgtcttttgctaacgataccttactcatatcctcattcctatttactttatttgcggcccatttttggtgccgataatgactttatctgcaccgcgatgggcaaataagccgtttgttactacaccaacaatctggttgattgttagctctaattctttggcgttgctgatgtctaaattgtgcacatctaaaatgacgttgccgttatcagttacaacacctttacggtaaactggatctccacctagttttacaagctcacgggctacataactgcgtgccattgggatcacttcaactggaagtggaaatgcgcctaatgttgcaacttcttttgattcatcaacaatacaaacaaattgttttgctaccgctgaaacgattttctcgcgtgttagcgcagcaccaccgcctttgatcatttcgttatgtgggttgatttcgtctgcgccatcaacatacacatcaaggcttgatacgtcgtttaactcaaacacttcaataccgagtgcttttaacttttcagtagaagcttcagagcttgaaactgcaccaacaatggtgtcttttactgtaccaagtgcatcaataaaatgattcactgtagagcctgtacctacaccaacaatggtgttttcatttacaaactcgagtgctgcccaggcagcggctttttttaattcatcttgcgtcataattatgtgctcagttagctatcagagaggcctatagtatacaaagagtttgcttaccattggtagattttctctggggttataatgtgttttaacggtacatcccacgattcaataggtaatgcagctacatgctgacattgatgcgcaagaccgattaatatcggtttttgccaattttcttggtaataccgagccaacgttttgtcataaaacccaccgcccattcctaaacggttaccttgatcgtcaaatgccactaatggcataagtaaaatatcaagcttgtctaaaggacatatttgactgcaattcaacttgggctccaagataccatagcgattaacagtcatgggtgaattttcttcatacctctgaaagtataaagttgtaccgttgaagggatgaataataggtaggtataaagagtggttttttcgccataaatctttaattaacaatgatgtgtcaagctctccatcattgctaaaatagatgcctatacgcgctttttgaggagtttctaatgattttatgtgttgagtaaatttcattttaagcgtaattgctgcatttttttgctgctcttcggtcagtgaattacgcttttttcggatggattgtctaatttctgttcgtgtgttgctcatgtcaatatatacatcaactttctaagaaagagaaaagctcagggaataactccacaataccaagaatgatcaataaaacaatcaccatcgcaatcaaagagtagagtagggtatttgagcgtttttttacaggttcagcgagttcttcatcaagtagaagctcatcatcttgccagctttcatcttgatcgctattactgctcttttcaacatctggtaaacgttgttctaaatcatcgagcttttcttctaggcggatcaaactactggtgatgtaatcaagcgcatcaaatatacgttcatcacgttgctttgcatctaggctgctagtggattgcgattggctaagaggttgtagctttgcttttatacctacgctggctaatagcttcgcttgcttaagagccttttcttgctcgcaaggagcgaatattggcttatgctcgaaaaatccagctactttgtttgtgctggttttaagcttgctagctagttgctctgtggcatgtgtttgatcaataccagcctcaagtcctgcaaacatcacacgaaatttgtctgccatcttttagttatcctaatccttaatgtagataacaaaagtataaacctaaatagatcaatggataaacaaaagcccgtacaaaacgggctttttctttataaatgaacaaaatatttatttagtattttgctgctttgccttcagctggcaacgagttaaggataaactcgcgtagatcattatttgaagactcaagatctgcatgacgtaaatacatcatgtgtccgctgcgataacccttaaagcttaggcgatctttcattttaccacttgggtctaattgccacattgtgtacttagcatcaaagtagttagttgcaccatcatagtaacctgattgaatcattacatttaagtaagggttttgcgccattgctaaacgtaagttttcgccggtattgttgccgctgcgatcccacgggtgaacattaccaaataggttatatttgatatctgttttgtagttaagctcttcacgtaggtaatagttaattgctggcgtgaatgagtgtaaccatgaggtaagctcagcccagtaatctggtgactcaccagcatcacgtttatcaatacctagataacgagagtctaaacgaccaacagtttgaccgcggtcacgtaataattctttccaaaagaaattagttggaatatcaaggttgttttgctcaacaaacttctcagataagcctgcgtattttgctgcttgtttgataattgcacgcttttcatctgcaggtaaaaagccacctttagcaattgctggtaagaacttatttacggtgaactgttctacttcaggaagtaactcgtctaagtcttttgcttgtaaatctgcgctgagggctttgtggtaccaagctgttgctgcaaagtaaggtaggcggttagctgcttctacggggccttcacgtttaataccaatctcagttggtgaaactaaaataacgccgttgatatacatccattggcggttttgtaattcgtgcgcaagacctgatacacgtgttgtaccatagctctcaccaattaaaaacttaggtgagcgccagcgctcgttgcgagaaacaaaggtatttagccactctgctaagtatttgatgtcagcgttaacaccaaaaaacatattttgctgatctgatttactaggcagctcacccttttcgttttcaagtacacgtgaatagccggtattaaccgggttgatataaacaatatctgctacgtctaaaattgaataagggttatcttttacgccataaggttgaacagggtagccttcgtcatcaatttttaatacacgtggtccagtataagcaaggtgcatccacactgatgcagaacctgggccaccgttgaacgaaaataccagagggcgttttgttctatcgtctactttgtcacgggtataataagtatattgcaacgttgcaacggcattgccttgctcatcccaaacgggttgcgtaccagtggcggcggtatatgaaaagcgctcgccgttaatgcgtgctttatgctctgtgactactttgctgtcgacatcaatgcgacgtgcgttatctgcaaagctaggagtgctaaaggtcagtgtcagtgctgttaccgataagccaataaaactaactagtttcatgttgattccttattattcgatttatagctattaaaaattaaagctaactcgatgacaaactaatgagactagtgaccaatattcgctgttgaagtggaaattaaccgaaaatcatgagcaaataacaaaaaaatccttttttttactaaagataatttgcttaattatttagctagattgaaaaatggcgtatatttagcgtgtttataatctgtgcacgtgcgcttagaaaagagaagttataatgcaaagagtgttagttgttgaagacagtaaggtggtgcagcaagtgttacgtcacttggctgctcactatctcgatgtcgctgtcgactttgcgtggtccctaaaagaagggataaatttaattgctgaacacgattatactttagcattggtcgatttaaccttgccagatgcaatgaatggtgaagtggctaagtacacgctttcaaagaatattccgaccgttgttctaacttctaaaattgatgagtacatccgccaacaaatgttagagcttggtgtggttgattatgtcgttaaagataatcgtgattcgtaccattacgcaataaagttagttgcacaattactcagaaacgatggtagcaaagcgctggtggccgatgactcagtattgagccgcactttaatgaagcaaatgctcgaaaagcaattatttgcagtgagtgatgcccaagatggtgagcaagcgttgcaaatgctcaaagacgacccagaaattaaattgttacttactgactatgcaatgccaacaatggatggttttgagttggttaaagcggtgcgtaatttccgcggccgcgatgacttagccattattggtttgtcgggggctggtaagcatggtttatcggcgcgctttattaaatacggtgctaatgactttttaacaaagccatttatgaatgaagagtttcattgccgtgttatgcaaaccatggaacaactcgctctaatagccgatattaaagaaagtgcatatcgcgaccatttaacaggcttacacaatagacgctatttttatcaatacgccgaaaaaatattaaagaatgttgaacaagagaatgttttagccttgcttgatattgattacttcaagaatgttaatgatcaatttggtcacgaagcgggtgatcaggcgcttaagcaagttgcatcattcttaaaagcaaagtttgatgattttaccgtggcacgtattggtggtgaagagtttgcagttgtgctcaataatatggatctaaaaaaggcagagcagcgattaaatacatttagagagcagttagccagccatgccttttctattaatggtgagccttactcattgaccatgagtattggtatgactccatttcaaaaagtgtcgttaacagctgctatgcgtattgcagataaagcgctatatcaagccaagcaacaacagcgaaattgcttagttattcaataattgagtaaattgcaccagctcaggttaattgttaataaaatgcaccatatgggtgcattttttttgttcaaaaaccaatattaaaatataaatcattgaatattaataataaaaaatagtggcacaaaggttggattacatacaccaacaggataacaataagcgtccgaagggggccactatgaaaatgattagtgcaataataaagccattcaaacttgatgatgtgcgtgaagcactggctgatttaggcattgaggggatgacagttgtcgacgttaaaggctttggccgtcaacgtggtcacactgaactatatcgtggagctgaataccaagtcgattttattccaaaaatcaaacttgaaattgcaactcgtagcgaaaattgtcaacgcgttgttgaaaccatcacaaaaattgcttcaacaggcaaaattggtgacggcaaaatttttgtttacgacctagaccaaatcgtccgtattcgtacaggcgaacttgatgaagaagcaatttaagggggaattatggaaaacacgattgtagagttgaagttctcgctcgacacattttactttttgatgtcgggtgttttagtaatgtggatggcggctggtttcgctatgctagaagcaggtttagtgcgtgcaaaaaatacaacagaaatactaaccaaaaacgtagcactattctctattgcctgcactatgtttttattagtgggttacaacatcatgtatgttgataacgcagaaggtggttttatcccttcatttggtgcattaattggcactcaagctgctgatgcagatcactctttagagtctgatttcttcttccaagttgtgttcgtagcaacggctatgtcaatcgtatctggtgcggttgctgagcgtatgaagttatgggcattcttaattttcactgttgttttaactggtttcatttacccaatcgaaggttactggacttggggcgcaggcttcttatctgagatgggctttgttgactttgctggttctgcaattgttcatggcgcaggtgcagcagccgctcttgcaggtgtgcttttcctaggtgctcgtaaaggtaaatatggcaaaaacggtgaaatctacccaattcctggttctaacctaccgttagcaacactaggtacattaatcctttggatgggttggtttggcttcaacggtggttcacaactgcttatctctgacgctgaaaatgcaacagcagtaggtaaaatcttcgttaatactaacgctgccgctgcgtgtggtgcaattgctgcacttatggtgtgtaaagtactttggggcaaagccgatctaactatggtgcttaatggtgcattagctggtctggtaactattacagctgagcctgcatcaccaacaccattacttgcttgtttactgggtctacttggtggttctttggttgtatttagcatcgttgcacttgataaagctaaaatcgatgaccctgtaggtgctatctctgtacacggtgtatgtggtgctttaggtattatgttagtaccactttcaaactcagatgcaaccttcgttaatcagttgattggcttagtatgtatcttaggatttgtgtttatcgcgtcatcaatcgtatgggcaattctaaaaaatactatgggtatccgcgttacagaagaagaagaactaaacggtatggatcaacatgactgtggtattgatgcgtaccctgagtttgtatcagttcgtagtaactaatctttgtgcgtgtttttacacgcacaaaaacaaatcattgtgtgttcaaatcaaagctctacttaggtagggcttttttgcaattaaataagtcttttctgataggcgatttagtcaattattagctatgcttaaggttccaatctaacaaggaaaaattatggataacaaactgttgcttattattatctcgctatttttaccgcctgttgcggtatttttaaaagcgggagcaggtaaagatttaatcattaacattattttatgttttatcttttttattcctgccgtaattcactcgctatggttgtgcacacgctaaccgagtttaagtgactgttaattttacaggtgttaatattgcctagcttgtcctgtaaaattaactgatcaatagcgaactcaatggctgataaaaaaacacctgcaaaaaagtcgtcatcaaaaactaaagcggcatcttcacgctcttcttctaagcgtaaaaattcacctaaaaatgctactaaagcggggattctaagaaagctttggtcaatattttggaagctttctttagcagttgtcattgctatgacactgtaccttatttaccttgatgccaaaattacccgccaatttgaggggaataagtggcagttaccagcccaagtctatgcgcgtgcaatgagtttttatcctggacaatatttatcccagcaagaagttatttgggagttaaaccgcttaaattactcttcagtaaataaactcagccgaacaggtcagtatgttaaatctgctaacagcattaaagtgtatcgccgtgaatttgaattttatgacggccttgaagatgcacatgttattgagctgcgtttttcgggacaaaagttagcaacaattaaagataaatttggtcgccgtttgaatagcgcacggttagagccagtacaaattgcacgtatcggcaatgactcaaagcaagatcgtgagtttgtaccgcttgataaatttccgccaatgctaaaagacaccttgctggtggttgaagaccgtaatttctatgaccatcacggcgtatcggtgtggtcaattatgcgtgctttgtatagcaatatcaaagcagggcgtaccgtacagggcggcagtactttaactcagcagttagcaaaaaatatctacttaactcgtgagcgctctttggtacgtaaatttaatgaggcgctaattgccttaattctagattaccgctacagcaaagatgaaattttagaggcctacctcaatgaagtgtatttaggtcagtcttacaatcaaggtgttcatggtatgggcctagccgctgagttttatttctcaaaacctgtggatgaacttgaatacgaccaaattgcgttgttagttgctatggtaaaaggggcatcgtattacaatccgcgccgttatagtgagcgcgcaatggagcgccgtgatttagtgctgcgattaatggttgaaaacaagcttattgatacacgtgaatatcgcgcggcattaaagcgtcctattgatattgcaccaatgaaagacagcctgcaaaagtcgtatccgggttacttagaattagttaaccgagaattaaagcgcctactaccagatcagcaagtgttagatgccggagtacgtgtctttacctattttgacttacaaaagcaaacggctatggaagagtcgattgaagcaagcttgccgtatcttgaaagacgccctaaaacagaagagcttgaggcagcgatgatctctgttaatgttgaaaaaggtggagtgtcggcgctagttgcaggccgtgatgtacgttattttggctttaaccgtgtactagataccaaacgtaatattggctcattagttaagccagcagtttatttaacggcatttgaaagtggtcagtttaatgttgccactttagtggatgactcaccgctgcaagtgactaacgaacagggcaaagtatggcaaccagagaactttgataagcagttccgcggaccaatgccactatacaaagcatttagtaacagtataaatattcctgcggttaacacgggtcttgatgttggtgtggataaagtggctgataccttgaagcgtttaggtgtagatgggcgtattgatcaatatccatcattacttttaggtgcacttgagctttctagctttgaagtcgcgcagctttatacaacgcttgctgcagatggtcagtaccgcgagttaacgtctatttcagcactgacagactcagtaggtaaagtgctttataaacatgatgtcacctcacaaaaacgctttgacgatgcatcaatctacatgaccaaatacgcaatgaaacgagtgaccaaagacggtacagcaaagcgtttaaatgcccactttccatcaattcagcttgctggtaaaacaggcaccagtaatgacttgcgcgatagttggtttgcaggttttgaccaaaacacagttactgttgcatggattggtcgcgacgataacaagagcactggtttaacaggcagtgttggtgcactagaagcctatattcgctaccttaaaccactcaatcctgaagctatagctgatacacgcccagcttctattcgttgggcctttattaacgaagaaaccggcctgcaagcgcctcctggatgcggcaaggttgtacagcttccaattcgtgccagcgagtttgagccaaggcctaattgtcagcgttaaacttggccctgaaactatttagctcaatgtataattgagctaaattttgtatgttgtagattgccatgaatgcacttccttcagtgtttctggcaagcgaactgacgtttatagagtttgaattgcagtactttattggatgacttgtagaataattagttattcttgtatgcctaaatcagacattgatgctgtgaaagctattaacctaccattagtatgattttattttgaagtcttgctccttcctcatgctttcacttgtattttataaggttgcttgattgttactcgatttacttcagataaatatcgactaattattgcagcactattagttgtaaatattaaaaaataaaagcctcataatgaggcttttagaatcgttgcttatcttactaatttaatcgaaattaaaagtcataagaagcagatagttggactcgacgaggagattgataactttccgctaaaccaaatgttgcactgtcatcaccagccgctatttcagcaacttcgtcataacgagttgctgtagctgcatcaaatacattgaaaatatctaatgcgaagcgtactttttggtcattaaaatgcaggttgtacgtaaagttaagatctaatcgcgctgtccagggagttgttcccatactgccgcgagggtagcgtttatcaccaacataataagtatcgccataatcatataagtctgggtttggtgtatagcccgcacctaatgctgtccaaggacgaccagaagcaacatttagatttgcgcctactaagaagttttcagtaactgcgtatgcaccgtaaactttaatattgtgacgacggtctgctggtaagttaccgttagcgccatccataagataagggtgatcccagtcttgtgttaaacctgcatcatcttgaccattatcagatttaacaaaaccttctgtgttaccgtagttatgtgaccaagtgtatagtgcttttaaagaccaaacctcatcccaacttttctcaattgaaaggtcaacggcagcgtaacgacgtttagcctcaggataacctagctcttcagctgtgaagctatactcttcagttacaccatcaccatctaagtcaaaattaaatgttgcgccattacctgggttgaataagaaccagttttcaccaattttttcaccatcttcatctctaaagatgtatgagccatcatcaatttgattacccagtgtgcggtatgtacctttgatgctccaagaccaatcatcattaatcgctgcttgataacctacaatgatttcatcattatacataggctcaagatctttatctgctaaggtatttgatggttttgcagtaccatcacccccgtttgaaatcgcaggttcacctaactggttatttagaccaattggagtaccgtcagcattaagaccctcatactcataccaagtgtggatataagtttcggcacctgcaaggcgaatgttcgtatttgcagcaacaggtaagtaatatcgacctgcggtaataaataatttactgtcaccgtcaccattgatatcccaagatgcacctaatcttggcgcaatttggttatcaatagatacaaattcatcaccatcagcattgtagtttgtgaaactgtcattacgtagacctaaagttaacgttaagttatctgtaacagcccattgatcttcgatataaatcgcccagttttcaacttcaaatgcaccaccattcttatagttacgtacacgagttgttttcatttcttctggaagaatataaccgtttggaaggcgagcaccttcttcgtatgttctgtagtagtagtaaataccaccagagttaatcgtagttgcatctgatgtattggtttctgagtcataaccaaatcttaatgtatgctcatcatttaagtaccaatcaaagtcaacgcgcaattgctcgcgcttatcttcattggcgcctacagtgaagtttacataacaggtagtatcaacacctaagtctgcgtcatagccagtagggcagtcatcaaagtcagaataatcagtttctgagaatttaacttcaccatacatagcagacatgcttaagtcatcagttaggttacctgtataacgtactgcaaaactttcaccaccgcgtttgtgataagctgtaccaccatctactgtgtagttcccaacgccattaggatcttcgattgtgctttctgagtatgtgcgttcatcgctaaaaccccaaagcattaattgatgatcatcattaatgttccagtcaatacgcgctagatagtaagggtcatcatctttttcttttgttagagaggtttgagaagcgttaccgtactcttcttcgatatcacggaatgtataaattccgtagaagaaaagcgtatcttcaattagtgcacctgaagcataaatatttgtttcaaatgagtttacatagtcatcttggttgttaacaaataaatcaccaatacagtgaccatcagcagcctcacaacgatcattttgtaagtaaactgaatttggtgcttgttctcttaatgaatcaggagagtaaattgactcaacaccaaagtgaaagtcattcgtacctgattttgttactgcagagatcaggccaccagttgttcgaccaaactcagacgaataaccaccagtcttaatttggaagctatcatatgctgagaatggaatggttgcgccacctaaaccgttacggaagttagtcatattaagaccatttacgtaatatgcgttttctgcgacagatgagccaccgaatgatgcttgatcaccaaagcgactatcaccttcagttgcaccaggggctagtaaagcaactgatgttaatgaacgagcaactggtaataattcaagttcttctgaactaatgttcaatgatgattccgtaaccgaaacgtcaacagcacgaactgcgccaccaacaactgcaatacgttctatattaccttcaaccaatggaatctcgagtagtgcagttttaccaacaccgataattacatcgttgatctgtgctttttcaaaaccagcctgtgacactgttacattatatttaccaacaggtacttggttaagattaaactgaccatttgcatctgcaatgagagttttttcataaccttttgacttatcggtaatggtgattgttgcaccagctaaagaaacgccagactgagtaatgatgttacctttgattgcaccattaacattgtcagccatagcaggcattgctgcacttaaggtcatagcaacagctgcagctgtgaatgaacgcttaaatgtttttgaaaagttgtttttcattgagctttccctgtgaaattttagattttgatttgttattgtttgttaataactatcacgctttgttttttatttatttggagttttaaccattaaataaagcgtgaaacaaattggtaacacattggggacatacagatcaattttttatattacaaatacgataaacttacaaaaaaacgccttggaacgatctaaagttgatgttttttgcttatttatacaaaaaatacacagatgtaatttgatgtaattgcgttaagtaaattttaattctgtttttaattcttataaaacagtttgttgggaattttatgtcgttttcgttacattttaaaatataaatgcaggaaaaaatcatttggtttgtataaatgatgttttaattataatatttttggtttttaatttacgaaaataatctgatctattattttctgaggggtaaacgtttggaagtataggccaccgattaaagtgacctattttattttttagattaaagcttcgcgaatgcgcgctctgcggctgcaatggtgtcgttgatctctttttcagagtgttcagcgcacacaaagccagcttcaaacgctgaaggagctaggtaaacaccttcttcaagcattaagtggaagaattttttgaagcgctctaaatcacactcagtcgcttgttgatagctagttactttttctttatcagtaaagaagaagccgtacataccacctgcatggtttgttgtaagtgcaatgcctgcttttttcgcagcggcttcaaagccttcacaaattgctttacttttagcttctagttcatcgtgtaaaccttcagcacataatagctcaagtgactttaagccagcagccatggcaattgggttacctgataatgtacccgcttgataaacagggccgacaggtgcgatgaaatccatgatttctttcttaccgccaaatgcacccactggcataccgccacctattactttacctaagcaagtaaggtctggtttgatattgtagtaagcttgtgcgccacctaaagcaacacggaaacctgtcattacttcatcaaaaataagcacagatttgtattcatcacacacctcacgtaaaccttctaagaagcctggtacaggtggaatacagttcatgttgccagcaactggctcaacgatgatacaagcgatttcgtcagcgtattttgcgaaaatggcttttacttcatcaaggttgttaaacgacacagttaatgtgtgcttagcgaagtcttcaggaatgcctggtgagtttggtacacccatagtcagtgcgcctgagcctgcttttactagtagtgagtctgcatgaccgtggtaacagccttcaaactttaagattttgtcacggccagtgaagccacgcgctaaacgaattgcactcatggttgcttcagtacctgagcttaccatacgtactttttcgattgatggtaccagctcttttactttctcggccattaagatttcagtttcggttggtgcaccatagcttaagccattttcaacggcttctaataccgcttgtttaatagcagggtggttatgacccatgatcattggtccccatgaaccaacgtaatcgatataacggttaccatcagcatcaaaggtaaaaggaccttctgctttagtgatgaataaaggagtaccgccaacgccattgaaggcacgaactggtgagtttacaccgcctgggattgattcttgcgcgcgattaaaaagatcttggctaattgtcatgaatagtcctattgggttgtcacgttaaatgagttggtttgtaagggctcagagagcccaaaacgaagcgagttaactattacgtttacggctaaaccaaggcacgtcgacttcatattgctcaactttgtcggcaacatctaaggttagagcaaacaacgccatgcggattaacacgccattttgaacttggcggaaaattgcgaggttgtcgttgctatttaaatcgttatcaagctcgtttgcttctaaacggctgtcacgaggcagtgggtgcatcagtactgagtttggtttacagtgtgcattgtaaattgcttggctgatacggaaaccaccacggtatttgttcgcttcttcttgtgaagggaagcgctcttcttgaatgcgggtttgatatacaatatcagccgctaagttgccttccattttatctactagttgaattttatgaccggcgttatcaacagcatctaaaatgtagtctggcatttgtaagccatcaggtgccaccatagagaacttaacgtctttataatgacacagtaacttagataaagagtgcacagtacggccgtattttaaatcacccactagggcaatgtgcataccgtcgatactttggttaaaacggccaagttcacgttcaatcgttagtaagtcaagtagggcttgagttgggtgctcattcgggccatcaccgccattgattactggtacatcacacccagtggcaaactcagcaacggagcctgcatcagggtggcgcattgcgactgcatctgcatacgcagagataacacgagcggtgtcatataacgattcaccttttgctagcgcagagctttgcatgcctgttgtttcgcggactaagccacctagtaagttaaatgcggtaccaaagcttacgcgagtacgcgtgcttggttcaaagaacaagttcgctaaaattgcgccctctaaaacattggtgcgcttttgctttttagcataaggctccattttcttagcaactgcaaaaatacgttcaatacaatctcgatcaagctgattgaccgacaggatattttcaccttggaaacttagcatggggtttgttcctaatcacatttatagggcgctggcactcggtatgggaggccgcataaatttgcgcagtactatagcaaatttttagcgtacacagcagcaaattataagttaggtttaataattgccagtgccactatagctaaaaggatgagtaccggaacttcattaaaaatacggtaaaagcgatcgctacgtttattgcgatcatgcttaaaatcagccagtaatttaaagcagtagccatgataaatataaagaataatcactaataccagtttgtagtgcagccacatgctgtatctaaaccaatcacgaccatattcaaaaatcgttaatacgccaaacacgagtgttaatacggcaaagggcgtaacgaaataaagtaaacgtcgctccattacttttagcattgagttacaggctttttcttcactcattgcgtggtaaacgaatagccgaggcaggtaaaaaataccggcaaaccaagcgatcataaagaacacatgaaacgttttataaactaatagcgcagtcatttaagtatccattttaattgttataacaaactgttgcgtatggtaaggatatgcctgatttgatcccaacgcaaaagacccataatttgttggttatcaagtaggttgtatatatacaccgcaccgctgcgtttatctttcagtaaatcaaaggcatcagctaacgttgcttggctacttagccctgtaaggttgacgtatttgatattactattttgatcagacattagacttaaatcatattcagcaagacgatagccgttttcttcatcatgcacaataagcggcgtttggctatcaagggcatcaagcgattctttgatttgctgtttgtcatcactgtaaagtaacttaaattgttcatccatttcagccattactccgactttttgtaacgcttcggtggctggcgatatttgatactcaagcccttggaaatcaagttgctgcataaaaatagagcggttaccaaaaaactgcagtgccgtgacataagccgttgagatcaccagcatggctggcacaataatctctgggcttgaggttaactccataaccgtagtgagtgctgccagtggggcgtgtaatgtggcagccaataatcccgccatgccaagcatgctataagtccctgtgatatcaacgcccggactaataaactgcgcgaaaaaggccattaaggtgcccattaataccccaagcccaatgactgggccgataatcccgccagggatacccaagccaatagcaaataaggtggcaagtaatttggcaatcaaaatggttgttaaaaactgcacatcatctggtgattcaatggcaatagtgatagcgctcatacctgagcccattgcatggggaaccatataagcaattaagcctgcgattaaacctgccagtaataggcgagggaacatgcttagcggtttaaaagtgcggattataagcatcaagttttggttaaatgcataagcaacagcaccaagtgccataccaaagatgattaaaaatgggtaatgccaaccactcaatggattcatagtaataagtgcaagctcagaagcgtcaccaaatacaaattgagtcgctaatgcgccggttaccgcagcgagcatgatgggcacgaaaatatgcactttatattctctaagcaccacctccattacgaaaataacggctgcaagcggggtgttaaatgaggcggcgataccggctgcaacaccacaccctgttagggtacgcgttgcattgtgtggaaggtgtaatttatcggccagtaaactggcgcccgttgcacccatatgtaccgaagggccttctcgacctaccgaaaaaccacttatcagggctaatgctccaccgacaaattggttcaccgtgttgtaaagcggcatatgaccataatgttttttaatgcggtgtattacaaatggaatgccaaggcgataatgcttaaagccagttagagctgcaaatagagcaattaataaggcggcactgaccggaagaagaactcgttcaagagtgggtagtgttgagaagtcatcaggcttctcaagaaataaactctggaaaaacatgatagtgaggcgaaaaagaatgattaaaactgccgcaattaaccctgcacttacaccaagtaagcacaactgcacagatgttttaggctttgctaaacgacgtcttagtctttcaagccacatgcatatttcctcacagcacttttgagccgcagtttagcaaatcaaattcactaagtccttgtgattttgaaattaataagtaatttactcaatgaaggttatcggtacggttactattcagctgatccgttagagaaggtaaatgtgctttaattgcatgagatagttcggggacgagcccagcatgttttttatgtacaacagtattgactgtcatttgtctaagtacaacaacttcaaattcttttcgcaagttatgaatatcaatttcaagtgcagggtagagcacattgtcaactcggcctttctttagcattcttaatatatggtttaaatcttcatttagaattacacgcgcttgaatattaaactccttgagcaattcaaggtctcccatcgagctcataatactaatgtttttatcgtctaagttagtacggttacatgtttcagatttacgacatattaagacaatatttactgtacctaagcttggttcaacgacgataatatcatcgaacttacttaggttgctttttgaacgaactatatccccatcgactatcccagcattaagtaataacacacctctgcgtgagggcacggcttgaagttgagttttgatatttaattcatcataaacagtttccataaactgtttgaatggcgctatatgagggatatctatataggtaaataataactttttgggttttatatagtgtgttgtcgattgtgaattgtcatcaaataagctctgtagttgagctagtttgctttgattctctggtgtgtttttaataccaataacgagtgggaaatctgtaaattgtctgactattttcggttgaggtaaccccttttcaatagcaaaataacctaaaatctcaggagcagaaatgacaaacttaacctgattagtcgttaataagatgaataactgctcatcggtggcgactcgaatgatgctatcattataagcttgaattatgttctcaatatatccaggatagacataagagtcgactacagccactttattatcactaaagagcttttctaaattatcaaatgcttgttcattctgttgatttgttaacacagcaagttgtgagttaaaaatagtaggcgaagcgataaagcctggttttatttccgagagccaagctgggtagtaacctagataccccggttgttcggccttttcgattgcatattgccatggtaagtattcaacattaagctcaattccttgttttgcaagtgtgtttctcaatgaagcaatcgcattaccgccatttgccattttactgctggcatagggaggaacttctaaagatgtaattttccatgtttcattatcagcagcagtgacactacccgacatacccagcactaataggatgagtggcaacaaataggttcgcataaaacaatatcatcattgatcgttcagtaattatacgcctaaattacaacctttttgtatttttattggtctttttagctaaaacgcgggcaattctattatctaagatgatgagtttaaagtgtatagcctacccgtgctgttattaagtacgggtattgctcccttgagatacttgattaaaacactcgggtattagataatcgccacattataggttttgagggtctcggtatgtctgatgagttgccaattaagttcagcgatgcagcagctgttcgtgttaaacagttaatcgaagaagaagagaatccggatctaaagctacgtgtttatgtaacaggtggtggttgttctgggtttcagtacggttttacttttgatgaaaaagccaaccctggcgatttagagattgaaaaaaacggtgttaccttagtggtcgatccgatgagtattcaatacttagtcgatggtacggtagattatactgaagggttagagggcgcacgtttcttcgttaacaaccctaacgcaacaacaacttgtggttgcggagctagctttagcgtttaaaaattttttgaaaaagccacttgatgtggcttttttattgttcatactctcttaatcccttcattaatgcactcacgcatcagcagaagtaagttttagcttctgagtttaagaataacaaaagaatagaaaccttagttgttagcagttttatcgtaacggtaatttagttgctttcgggtaataccaagtaatcagcagctagctgaaaatacacatcaatcaacctgttcagatcgcattgccaaagttaagggctgagtttgaaagcttggttgttgagtaagaacttataaaaagaataggttcattttgaggttctaggcatgcatctatataaggggattgtgttgtggttcagtcagtaaacgtcgttgctgcaataggttattgcagtaattggcagattggtattcgagaccatacgacacagttctccttgcttattagtgctaagaaaacgaaatcgttagctcgtttaggtaacttcgttgcgccttgattaataataagtgactctagtgttgagtcactttaatcatcagtaaaaagaagcccaaaacaaatacagaggcgattaatatatatacaaatccttttttcccctgcttaattggtacacgattgtgtctaagaaacaggtaccacgctacacagagtacaattggcaacaaaaataatatacgaaacatttcttaacctttttcagtatttacatacactttaagcataaatttacagtttataaagcgataatttaagtgtgataaggtttcaattgattaattttttggtacagttaacaactggcaatagagcacatgctttaattttagctacaattaagtttgtttaactatgcggtccattcctaaaagaaggacatttgtataattattcatccaaagcataagttattagtatataatgtgttcaggagtgagacgggcaaaatttcactctaaatttttaatttaaatcatctagtaggagatgtattttatgatgggtaaaacagtttcttctgaagaaaactcaaaattaacgaaatggcttaagacgaagcgccatgagaaaggtcacacaatgcgcagtcttgcacaagtgttaggtacgcctcactcttttattggtaaaattgaaaaccaagagcgtcgtttagatgttattgagtttatgcgttattgtgatgcgctagaagttgacccatacgaaggtcttaacttattaaaagacgcataattgttgactacccagaagtttttaacttctagcatatagtatgaatagtgcatggatgcactatttaagccccgccattgtaataactacactttatttacatacgtttttattttgttaattgtttttgtggtagttgttttctaacgcataaagcttatggcgaattaagaacaaaaataccaatgatggaataaccataagtgctgttagcacaaaaaacatggcccagttaccatctaaccaatcatcaattacaacgccgctgtaacttgaaagcaaagttctacctaaattacctaatgaggcaagaagcgcgtagtgcgttgcactaaatgctctgtcgcagagcatagatataaatgccaccatagcaacgagagaccatgcttgggtaaagccatcaacgataatggcaaaggcatacagactcaatttagggcccgcaatagcaatccaagcaaaagctaagtttgaagcagccatcgcaataccactaataaacaagccctttacaatgccatagcgttgattaaatagactccctaagaatgtgaaagcgatggtaagcactgcagtgcccactttcgagaaggtggcaatgtcactattcgaaaagcctacttctttatagaacacaatagacattcgccctaaaaaggcttcaccaattttaaataagaagataaaagctaataatgcgagtgctgttttaacaccattacgcgcaaagaaggttttgaatggatcaataacagttacagcaagccatgcgattatttttgtcagtttgctttgtttggcaccagctaacttttgttggtaagtgcgttcaagttcagcttgcacaagttcgcggttagaatcaggctcttttgcccaaaaaacactgctcatcagtaataacatgacaacagataagaaaaaataaacttcaggccagtcaattgatggaatgtcagctaaataaaaaggcaaggcaccaagtaaagcatagccactccaccaacctgatgttgccatcgctgctgcagcggtagctttatggctttcattctcggctaaggtatcaatacgaaatgcatcaatagcaatatcttgggtcgcagatgcaatagcaatgactaaacaaattgccgctgcaaaccagaggttagctttaatatctaaacctgctagtgcaaaggtgccaataaaaatgactgactggcacaataaaatccagctgcggcgctgaccaagccaattgaataagaatggtaacttgacgcggtcaactaatggagaccataaaaagttaatactgtaagcaccgaaaactataccaaataagccgatcatgcttcggcttaggccctcatcttttaaccatgccgacaaaacagagccaatcaacacccatggaaagccactgctgataccaaagataaaaatgttgattaaacgtttgtctttgaaatacgaaaagtactctgaaattgaaagcgggtttgtcatagtattgccaattgatggggctaagaagcccctaattattattgattagcgtcaagcactttaacgtttaaaataacgataggtgtttttggtacaaagctgtaaccaattttttcgttgtatgcggtttctgtacgcataattttatcaagtgtttcgtagccatccataaccataccaaatacggcaaagccccaatcgcggcccgggtttaaatggtcattgtcgtccatgttaaaaaagaattggcgagtgcctgagtgcggcttacggtcttggtacgccatagcgatactgtacatatcattttttaagccattaccactttcgttaaaaatagggtcgtattcgtgcaagccatcgtagtctttgtcataacccccgccttggatcacaaaatcgcgttcgttatcgtcgtcgcgttctacacggtgaaaaacactgccttggtaactgccatcagcaacgtaggttaaaaagttattcacggtaatcggcgcacgagagcggtccatttcaaccacgatgctgccaagtgtcgtgacaatttcaacacgtggaaacatattgtctttttgaataaacttaccttcagttgctgcaaatgaactgtgagcaaataataaaataaaactgagtaagagaatgcgcttcatagttacccctctaaataagcgattaattctgggtcagatacaatgcgggtaattaattgttcagtcaacttattaagctgactttcaattttcgcacggtcatgacttaaaggcccttctaaattagcaccacctcgatacaccttactaaagttgctgttatttctaatcacacgaacacctaactcaatactggcaacacttgtgtgtgtcatcagtttttcagttacgacggcttgtagtttatgaatgtcaacttcaaagcgagttgttgcaaggttagaaatattggctccatttctactcaatgcgctatcgagggtactcttgagcgaatctgctattcctgggctggctaaagtcttcactttaccggattcaatgatttttagagtgacattatcacctcttaaatcaataacactggtacttacgttgctatctatatgggtgattttaccactttgataaacagggtttaaaattagctgattaggctgattactacacccagcaagcgctaataatgcacataaagaaagtaactttctcatctagattgctccatcaatgatttttagttgcactaagtacgacaaactttttgttagaacctaatagtttgcaattgccgaacatgcgctttagtttttcatggtagtcgaggtggcgattaccgataatccttaattcaccaccttgtttaagagtatgtttggcttgtttaaacatttgccaagcgatgtgatcagtcacagcttgtgcttggtgaaacggtgggttacataaaacaaggtcagcactgtcaggttcaaaatcggttaagcaatcgttttgtataaactcacattgctcaagttgttcaggcagattgtgtgtaacatttagttttgctgattcaacggccatatacgattcgtcaacaaaagtgacatgggctttagggcagcgttttaaagtcatcaagccaactacgccgttgccacagcctaaatcaataatacgacgagctttgctagtttgtggtaaatagttaaagaaaaaacgtgcgccaatgtctaacgaatctctagaaaatacattcgcatggttttgaatttcaaattcactgccttcaagtggccaacttacagggaagggggcttttttatcaaagccactggttttactgattactaagcgagactttttaactgctaagctggttgaggtatcaccaatatactgattaaaggctttaattgttgaattatggatatctttggtcttacctgcggcaataactgaaatgtctttaggaagagctgcgctaatagctgcaagctgatgctgtaaatagcctaaattacggggcacttttaagatcactaaatcaacctggcttggtaaagcttgtaatgaatgaagctgcttaactgaatcaatcgttaactcattggcttttagattgtaacgtgttgcttgatgaccaatatacgaatcgttaactgaataaactgttaatgaattgaatgcgcaagcaagtgcgccaaagctgtcattcaaaatgagcactgaatttgcgtcaggatgatgttcttgtacataattgacaaggtattcatcaccagaatcccaggcttgaagactgcgatttttttgatctaaaggaaaacgttctagggtataggtgttatcaccgagctgtgcttgggtggtcatcatgattttacgataagtatttaagtataggtaaattctaacatgcaacagccaaacgccaaccctaatcatttacctgaggggttttcttatcaagcgaaggctttaagtgcgcaaaaaagtctcgatttattttattacctacagcaacatcttaattggcagcagccttctattaaagtttatggaaaaagtcatgtgatcccccgtttgcagtgctttattgctgatccgaatgttaattatggctattcagggtcacagctaattgttgaaccttggccagcggtgcttgatgccatgcgtaaacgtttaacagcgcaattgcagataccttttaatgcattattggtaaatttataccgtgatggtcaagattgtatgggctggcacagcgatgatgaaaaagagctcggccagcagccgactatcgcatcaatatctctgggggctgagcggaaattcaaaataaagcataaacatactaatgagcaacacgatcttattttacaaagtggtagctgcttaattatgaatggccatagtcagcgtgattaccagcattgcttgcccaaacaacaaaggttaaaacatcctcgaattaatcttacctttcgctcaatacgataaaatcattggtaaaatgagccacgcccttgatatagtaacggccaattattttgcaattaaaggtctatgacacatgtcaatgcaacaacaaattgaggaaaagctcgctgcgggtatcgaatgtaaacacctgaatgttgtcaatgaaagccatatgcatagccgtggaacagaatcgcattttaaagtggtggttgtgagtgaagagtttgcaggtaaacgcttacttgcccgacatcgtcaaattaatgagctattaaaagatgaattagcaaaccacattcatgcattagcgatccacacatttactcctgaagagtttagtgaacaacaaggacaggcacctgaatcacctaaatgcttaggcggctcaaagttcgattaaattagcaggacagtcacccaaagttaagtggacagtcactcaaagttagcaggacagtcactcaaagttagcaggacagtcactctaaactgcttgtcacttggggttttaagctcgaaagatttaagtgggtctgaaaagttttactgatcagacctgtattttaactattagcctttaaactagcgctaatttttattgtgatagatataggatgatcaatggtcattaagcctaaaattcgtggatttatttgcactaacgcacacccggtaggctgtgctgagcatgtacaagaacaaattaactatgtgaaagcgcaaggaccactgagcaacgcaccaaagaatgtactcgttattggtgcgtctactgggtacggcctagcctcgcgtattactgctgcgtttggtggcggtgcgaaaacgttaggtattttctttgaaaaagaaggtagtgagcgtaaaacaggttctgcaggttggtacaatactgcggctttccaagcagcggctgaagaagcaggtttgtggtctaagaatatcaatggcgatgcgttttctaacgagattaagcaaaaagcaattgatactatcaaagctgatctaggtaaagttgatttagttatctacagccttgcgtctcctcgtcgtactgatccaaatacgggcgaaacttactcgtcaacgcttaagccaattggttctgatatcacaacgaagaatctaaacacttcaaagcgtgtgattgatgaagtaacggttgaagcagcaagccaagaagacatcgacaatacaattaaagttatgggcggtgaagattgggaaatgtggattgacgcattaaaagaagcggatgttcttgctgataacttcaaaacgactgcctacacatatattggtaaagaattaacctggccaatttacggtcatgcgacaatcggtaaagccaaagaagatcttgaccgtgcaacgcaagcaatcaaagagtctacgaaagacttaaatggtgaagcgtatgtgtcttcattaaatgcggttgtaacacaagcaagctcggcaattccaattatgcctttatatatttctgctttattcaaagtaatgaaagcagacggtacatatgaaggcacaatagagcaaattcacgcgttatttactgaaaacctttacggtgagacgccacgttttgatgacggtggtcacttattccaaaactacaaagagttagaagatgatgttcaagctcgtgtacaacatgtttgggatactgtagatacagatacgattgacgaattaacggattacgtgggttaccacaacgaatttttacgtttattcggttttggtatcgacagtgtagattacgatcaagatgtgaatcctgatgttgcgatttcgcagcttatcgattaatcgataaacaaactttattttgaaaagtcgcttttttaagcgactttttatgtttgtggatgaaaataaatctgcatcaatagcactttggtctatattgaattttattcaaatggtttttgtagtctaaataatcacatctgtcgtataaatttcatatttgctctcgcatagtcaccctgattgatgttaaaattcgggtaatatatgtgaggagtttactgcgttgcttgtttgaggtgttcaacaggctattctttgatatttagaatttaacctgagcatatcaaaaggcgacgtggttggtacgatttttcagtttctttccgttaatgtaatgcaagtgcgtatgatcaacataaaaaaaggtctggatttaccgatagagggcgcacctcagcaagttattcatgatggttctgccgtcaaacgtgtagctgtgctaggtgaagaatatattggtatgcgtccaaccatgcatgttcgcgtggatgaccaagtcaaaaaaggccaggtactttttgaagacaaaaagaacccaggcgtcttatttactgcaccagcttctggggtagtaaaagaaattaatcgtggtgctaaacgtgtgctgcaatctgttgttattgaagttaatggcagtgagcaaatcacctttgactctttcaaggccgatgagctttcgagcttagaccgtgaaaaagtgaaagaagtactggttcagtcaggtcaatggacagcactacgtgctcgcccattcagcaaagtagctgctttggatgcaaatccaagctctatctttgtaacggctatcgacactaacccgctagctgcagatcctgcagtgatcattgctgaaaacactcaagcatttgaagctggtttagctgtggtatctcgtttaactgacggcaaagtatttgtttgtaaacaagctggtagccaagtgcctagttcatcaatccctcaagtagaagtacatgagtttggtggcaaacatccggctggccttgttggtacacacattcatcacttagacccagtttctgctagcaagcaggtttggcacttaggttaccaagacgtaatcgcgtttggtaatttgttcctgacaggtgaaatcttcacagaccgtgttgtttctcttgctggtcctcgtgttaaaaacccacgcttagttagaactcagcttggcgcatctttagatgatttagttgctggcgaattagaagacggtgataaccgtgtgatttctggttcagtgttgtcaggtgctatttctcaaggtccacatgcgttcttaggtcgttaccatgttcaagtatctgtattacttgaaggtcgcgaaaaagagctattcggttggattgcaccaggtgctaataagttctcagtaacacgtaccttcttatctcacctaacaccaagccgtctatttaacatgacgacttcaacaggtggttcgaagcgtgccatggttccaattggtagctatgagcgtgttatgcctttagacatcctacctacactattattacgtgatttaatcgcacgtgatcttgatggtgcaatttcgttaggtgcgctagagcttgatgaagaagatttagcattatgtaccttcgtttgtccaggtaaatacgagtatggttcaatcctacgcgattgcttgactacgatcgagaaggaaggctagagagatgggtttaaagaaatttctagaagatattgagccgcattttgaaccgggtggtaaacacgaaaaatggtatgcgctttacgaagctgcagcgactattttttatacgcctggttacgtaaataaaggcaaaacacacgttcgcgataacatcgacctaaaacgtatgatgattttagtgtggatggcaacgttccctgcaatgttctttggtatgttcaacattggtcatcaggccgcaggtgctttagcacaaggttttgaactagcaaatacatggcaagttggtctgttccaattattcggtggtgagttaactgctgaatctggttggggcgcgaaaatgttttacggtgcctgcttcttcctaccaatatacgcagtaacgtttgctgtgggtggtttctgggaagtgttatttgcttcagtgcgtaagcacgaagtaaatgaaggtttcttcgtaacatctgtactattcgcactaatcctacctgcaacgattcctttatggcaagttgcactaggtattacgtttggtgttgtaatcgctaaagaaatctttggtggtacaggtcgtaacttccttaaccctgctcttgccggtcgtgcgttcttattcttcgcatacccagcgcaaatttcaggtgacacagtatggactgcagtagattcattctctggtgcaactatgcttggtcaagcagtggttggttcacttgattacagcaacatggaactatggtggaatgcgttctacggtttcattcaaggttctgtaggtgaaacgtcaacactagcactattaatcggtggtttattcctaatttacgtgcgtatcgcttcatggcgtatcgtactaggcgtattcctaggtatggttgcaacgtcattcttactgaatacaattggttcagaaactaacgcagtatttgctatgccttggcactggcacttagttcttggtggttttgcatttggtatgttcttcatggcaacagacccagtatctgcatcattcactgacaaaggtaagttcgcttacggtgcgttaatcggctttatggttgtaatgatccgtgttgttaacccggcattcccagaaggtatgatgctagcaatcttatttgctaacttatttgcaccattattcgatcactttgtagtgcaagctaatatcaagcggaggttggcacgtaatgtctagtaataacgaatcaatcggcaaaacgctaaccgttgttgttgcactatgtttagtgtgtgcaatcatcgtatcgtttgcttcagttcagcttcgtcctttacagcaagctaacaaaacacaagatatccaacgtaatatcttagctgcggctgatattgaagtgtcaggtactgtatctgatacgttcaattctagaatcgaagcacgtgtagtagatatgaacactggtgaatttgttgaaggtgttgatcctaactcattcgatttcgagaaaactaagtttgaccaagcacgtagctttgcgttaaaagcagaaggaattaaagacatcgctggtattcagcgtatgacaaaaaattcacctgtttatatctcgaaaaaaccagacgattcagttgatgcaatcattctacctatccaaggttacggcctttggggtgttatgtatggcttcttagcgcttgaaagcgatggtgaaactgttaagaacatcaatttcttcaagcacaacgaaacgccaggtctgggtggtgaaattcaaaatccacaatggactgctaaatggcaaggtaaagagttaccaatcaatatcatgaagagcggtgcaaagaacgaacatcaaattgatggtctttctggtgcaacattaacttcaaacggtgttgatcacacagttgacttttggactggcgaaaacggttttggtcctttccttgcgaaagtacgtgaaggagcgttgaaataatggctgatactaaagaaatgaagtcggtcctatttggtccggtattcgcaaataacccgatcgcactacaagtacttggtatttgttctgcactagcggttacttcaagcttaaaaaatgcacttatcatgtcaatcgcattgacgctagtaactgcattctctagcttgtttatttcgtcaattcgtaaccatatcccatcatctgtacgtatcatcgtgcaaatgacgatcatcgcatcacttgtaatcgttgttgaccaagtactgcaagcattctcttatgcaacagctaaagagctttctgtattcgttggtctaatcattacaaactgtatcgtaatgggtcgtgctgaagcatacgcaatgaagtcaccaccgctaatgtctttcctagacggtatcggtaacggtttaggctactcagtagtgctattaactgttggtttcatccgtgagttattcggtaaaggttcactattcggtgttgatattatcccactagtacaaaacggtggctggtatcaaccaatgggtctattgattttaccaccgagtgcattcttcattattggtttatttatttgggtacttcgtaccttcaagaaagaccaagtagaagcaaaagcgtaaggggcgagcagtggaacattatattagtttatttgtaaaagcagttttcattgaaaacttagctttagccttcttcctaggtatgtgtactttccttgctgtatcaaagaaagtaacaacgtcaatcggcctaggtgtggcagttatcgtggtactaggtatctcagtaccagtaaataacttggtttatcacgctgttcttgcaccaggtgcattagagtggcttggctacccagaagcagaccttagcttcttacgtttcttgactttcatcggtgttattgcagcacttgtacaaattcttgaaatggcattagataagttcttccctgcactttacaacgcgttaggtatcttcttaccactgatcacagttaactgtgcaatcttcggtgcggtatctttcatggttgagcgtaactataacttcggcgagtctgttgtttatggtatcggttcaggtgtgggctgggcactagcaattactttacttgctggtatccgtgaaaaaatgaagtactcagacgttcctgatggcttacgtggtttaggtattactttcatcactgttggtcttatgggtcttggctttatgtcattctctggtatttcactttaataggtagcgaggataaatcatgaatgagattttcttaggcgttggtgttttcatcgctatcgttgttattttagttttagttatcattggtgctaaatctaaattagtagcaagcggcgatatcaccatcggtattaatggcgacccagaaaaagctattacaacatcagcaggtagcaagctattaggcgcgctagctgattcaggtatcttcgtttcatctgcgtgtggtggcggtggctcttgtggtcagtgtcgtgtacacatcaaagaaggtggcggtgatatcttaccaacagaacttgatcacatctctaaaggtgaagctcgtgaaggctgccgtttagcgtgtcaggtaaatgttaaaaacgacatggaaattgaacttgaagagtcaattttcggtgttaaaaagtgggattgtacggttatctctaacgataacaaagcgacattcatcaaggaacttaaactacaaattcctgatggtgagtctgtaccattccgtgcaggtggttatattcaaattgaagcaccagcgcaccacgttaaatatgcagacttcgatattcctgaagagtatcgtggcgactggaaccacttcggtttcttcgatctggagtctaaagtagacgaagaaacaattcgtgcatactcaatggctaactacccagaagaagaaggcatcatcatgcttaacgtgcgtatcgctacgccgccgccaagagacctaagccttccatgtggtaaaatgtcttcgtacatttggtcacttaaagcaggtgataaagtgactatttctggtccattcggtgagttcttcgcgaaagacactgatgcagaaatggtattcgtaggtggtggtgcaggtatggcaccaatgcgttcacatatctttgaccaacttaagcgtttaaaatctaagcgtaagatgagtttctggtatggtgcacgttctaagcgtgaaatgttctacgtagaagattttgatggcttagctgcagaaaacgataacttcgtatggcacacagcactgtctgatccacaaccagaagataactgggaaggttacacaggcttcatccataacgtactttatgaaaactacttgaaagatcatgaagcgcctgaagattgtgagttctacatgtgtggtcctccaatgatgaacgcggctgttatcaacatgctaaaagatcttggtgtagaagacgaaaacatcttattagatgacttcggtggctaacaccatacacaaaacaataagttttggttagaatacaggcctcgtagcacacagtgttacgaggcttttttatttctatacctacattgcgtggtatccaaaaggtgaatgctatgaatagagtgttttatcgccaaggtttgatggccttttttctactaactattactttactcatggctggttgcagccaagcagataaggtcgaagagctttattttgaaggtaagacaatgggtaccacctatcacataaaggtgtacgctgagtcttcaaaaattgcaggtattgatttacaccctgaaattaagcaagtgcttaaagatgtaaatcaatctatgtcgacttacattccagattcagaaattaaccagtttaaccagttaccagcagggcaggtgatgccaattagtgctgattttagaaacgtggtagcggagtcaatccgccttggtgaatcaacaaaaacgttagatgtcactatggggccacttattgacttgtggggttttggcccagataaaaagccaactaaacgcccaagtgatgaagcattggctgcaatggttgctaagattggtgttgataagctagaacttactgatgcaggtttgatgaaaacaatagatggtttagagctatcgttttccgctacagccaaaggctatggtattgataaagtcgctgaagtgatagaaagccatggtctgacaaattatatggttgagattggtggtgagcttcgtgtatcgggtattaaacctgacaacatcacgtggaaaattgcaattgaacagcctgatgctgagccaggcgttcgtaaagtgcataaagtgattgagcctggtaccaatggtattgcgacatcaggtgattaccgaattttttacgaaatggatggtgtcacatatagccatctaattgatcctgtaacaggtatgcctagtcgtcatgacttagtatcagttacagtgttgcacccatcagcaatgactgcagatggcctagccacagcgcttacagtaatgggcatggagcgcgcgcaaaaatatgctgaagaacatgatttgccagtgtatttaattggtaagtcagacaatggcttagtaacttattcaagccctgcatttaaaccttatttgtagcagggcaagaagcagtttataatgcacacagcccaacaggttgggcttgatttaattgctgacgataggggcaaagcaatgtcactttttcttcttacatttggtctacttattttaattgtggcagcgatggctgttggtatgattgtgcaaaagaaatctatggccagtagttgtggcggcctaggtgctgttggtatcgacaaagcctgcgactgcgacgacccgtgtgataagcgcaaaaagcgcatggcaaaagaacaagcttggaaagagaatcaaattctttaaccacaaaaaagcgccttgaggcgcttttttaatgcctaaattttacaaggacagtcactgttaaatatattttacttagacaatcatatttgattttaagccttagctcttaagaagttaatcatttaactttaactcgatgacttgaacgtattcttcattatcaaactgcaaatcttctaaagtaattgcgccctcaaattgtttaaagttaactggttttgaagttcttaaattagttgcatacttgatgggagttgcaagctcaatgcttaatgtatctgcttgccagttaagaatatgaataaaaatactctcattattatgggtactaactccccagttttgcggggaaatagggccgcctcgagtaccgtatatactcttaccgaacaccttgagccactggccgatttctgcaaaagtttttaggttttctggttggatcttgccgttaggcataggcccagtatttagtaaataattagagtttcttcctgcggcacttactaaggtttgtacgagctctttagttgtcttgtaattatcatcagttaaactgaatccccagctaccgttcattgtttgtgccatttctaaaggtaattcacctaatcgttcttgattagtaggcagctgttgttcaaagccctgataatcctctcccggaacagtaaatctgtgatggttatttacgattaaggttgctggttgtaattcatggatcattttataagtgcgttgtagttgccagttatcccaattgttagagtcttcctggtcccaccaaccatcaaaccaaataccaccaatgggcccatattgagttaaaagctcttttagttgtgcatcttgaaattgcaggtatttttcccagtcaccacttttttctcgcttagtgtaatggcctgttcggccccatgggtagtaatctgggtgatgccaatcaagctgagagtagtaaaaaaaaagttgtaaaccatgtttatgagctgaattagctagctcttttatagggtcttttttataaggtgtactatcgactatatcaaaattagatactttactatcgtacatagcaaacccatcatgatgctttgaagtaataacaatatactttgctccagcatctttaaacgccttaacccactgttctgcatcgaaaccagttgggttaaaaaactcagccaaacgctgatacttagggcctgaaatacgtaaatcttccatgatccactcggctccataggggcttcctacaccaccaagctgactgtacagtccccagtgtaaaaagatgccaaacttattatcttgaaaacgttctcgagcttttaagttttcaggggcgggagtgtacgcttgggctttactagggtcaattgcgacgcctgtcccagcatgccctacacttgaaaatacaagcagtactaatatcagcaagcaatttaatttattcactgtatacctcataaactaggttctttacttaaaggtagcaggaaatcatttagcgaaaagtaaagcaattatgcatattcgaaggttttatatatgcaaaagcataggattacgacgttaaaagtaaaactcttttacacggacagtcacttttatctattaacttattcttgcggcaaaaaagattttgtctacactttagttacagctaatgcatttcaaattatcagttcaaggagtggacgatggctttagcaaggaagcggcaaatctgtttgtcgaatactaagtattatcactgtgtatcccgttgtgttagacgcgcctttctatgcggagaagatgccctcacaggtaaatcatatgaacaccgccgaggatgggtcgaagagcgcctgcttgttctcgcaaaggtattttgtattgatgtgtgtgcttatgccgttatgagtaatcatactcatgtagtgctttatgttgatgataaaaaagcaaataggttatctgataaggctattcttttacgctggtataagctcagtaaaatgacgcctttaggtcaaaaattccttcatggtgagccgttaagtgacgggcaacaagtcttcttaagtagagaggttgcagaatacagagcgcgcctttcgagcattagttggttcatgcgaatgcttaatgagtatattgccagacgtgcaaataaagaagatgagtgtacagggcacttctgggaaggccgttttaagagccaagcattacttgatgaatcagcgcttttagcgtgcatggcctatgttgatttaaaccccgttcgcgcaaaatctgcgagcaccctagagcaatctgattatactagttttaaaaagcgatgccaaagcgtgaaggaatcaaagcagcctaagctacttgctcattttgttggtggaatgaacaagtataaatcaaagggtataccttttgagttaaagtcatacttgttactggtagagcaaactgggcgttgtatcagcgcggataagccgggatatatagagcatcatttacctcctattcttgaaaggctaaatttcgaagctgaaagctggttaacactaacaactcaatttgaaaacttatttcgtggagctgcaggtcgagtgggggctatcgaaagttattgcagtaaaactgctcgtaagcgacgaagtaacctagcaaattgtaagctattacttgctagctaatttttaatttcaatcatttgtaactttttgcaaattcttgcagctaacttgtgctttccatttttacaaacctaagtctttcatcctgatttttattaattaaataagttaatagggtgggctggctaagaagcaagtattctaggttaaaaagcccaaagtatttgaagattcagcaggcactttaagagtgcctgtcttttttaaagtgtgcttattctaaattaattaattcagtgcctaaaactgcgtacttatttataccgttagcttgtaacaaaaaagcagctggggcatggagcgatggtattgatgtaaatacacttttgcatgcgtaaactggccaatttgtggcgttttctagtttaccaatatcgccagagaaacaactatagccttgttttaaaagctctttgtaattactttttgtaagcgttaacgatttatttaagacaaagccttttcctgctttaaagcttaggctgcttgcatctaaacttgtgtaaccttggcggatactacttatatcacccaattctttaattatgggtgactgtcctttgttattgactgcaatatctatctggtaatcacctagctcactatttactgttacatcgtctattaataagtcgacccaattgtctttagcgttaaatggaatggagtggtactgggctattttcgcgtttttccatgctcccgtagttaacgaatcaattgcattcttatataaaacacggttaaccttgcgggctatttgtcggtttggatcgtttgggtaagcgcctgattcaattaatatagttcggatccctttttctgaaaaggtatcgccaaaactgcggaaagagtaactgtcgttgtactttcctaagtgccctgggatcattgtttcaaccgatttggctaaatgggcaataaactgcatagcctctccacgacttttatttacttctcttgcttcattataggcgggtgctagcactgaaatagtggcttgtttacccattttacctgcaccataatatgcattttgatcatgtaaattaaagccaaagtcaggtttaaattcatttgcaacagccatgagtatttgcccctcttttgtgcgaagagcttttgcatcacgatttaaatcaataccttgagcattatgacgagtttgcattgcagcgccatctggattaaccatgggaatgatgagaagggttattttctgctgccagctagtaagccactttgcattttcatcggcagttataaagcttaaaaagtccattagcgcggcagttgctgtgttttcgtcgccgtgcatttggctccacatcatcactttgattgggccgttgccgattttaagagaattaagtgcctgtccttggaatgaggtgccgatttgttttagtgtaacgcttgggtgctttgctgcgctttttaagtaaggttctatatcggcgtagtaaatagcaggtttgttcaagccgctcgctacggtgtcttcaatcgtatttgcgagtgtactggtacttaatgttaaaagggctgcggcgagtgcatgttgacgcataattatctcttttattctttgttttgattatttgtagaatattatatttaaactggtttggctaatccttgttcagtattaaagctttgattgctactgagtaagtgtgtgtttaatccttgtttatatgtcattttctttttgttcattgctttttgctatataaaatacacttttaattttaactacttagctttgataaattgctttttttacagctcattagcaattagctaaacaacacttaaccttgtgctgttaatttctacttgtaccgtctgttgactttgttatactccacatcgaaatttcagtaattactgaaactttattgatgaagatcatgttaccgcatttaaaaatagggtaagccgcttacccaaaatgcagtaaaagcgataaaaaggcgtgagttttgcgagcaattagtcagtcacaaggtgtcaaacagtctagcttagctagattgcagttggctgcgcgtgcgttttttgctggtaaagagctaatgtcagttttagccttgttgctgattaattcagccatgctaatcaacggcacagtagaagatgctcaagggctaagaagcttattaagcgaaggtgctttatacgaaacaccgttgcttaatgtgttgagttttttagcttaccctgtggtatcttgccaattacttattggtttatgctggttggtcttccatttcttccctgcgcgtcgtgcaggtgtcattttacgtaaagcggccttcgctgcgcgtgaaacgataaagtctttagtagtacacagcgctcatggctgtcgtgctcctcctcgtgtaagtggttgtctgtaaataagctttgttgcttaagttcagccattttagtcgttttctaagttgtctttactaagcacctagtgggttttttacgcccaaatttcagtcagccaacctaaactccctcactttttagcgtgccgatttgtcgtgctcgttagtcagccgagggatatctgtagcatctgttgcagaaaagcgtcgtgttcttatttcgacaagtgttaacttttaggttgtaggatattcctttgtcaattcgaaacctttgtaatattgctctagcgtctttagtgctggccttgtctggctgtaaaggcggggtactcgatccaaaaggtcaaattggtgtcgacgagaagtatttaattatcgtagctacggtgttaatgctgatcgttgtaattccagttattgccatgacaatttattttgcatggaaataccgtgatggacgagatcaagaaatttacgctccaaagtgggcgcattctaataagattgaagctgtagtttggaccatacctatcattatcgttgcaattttaggtgtgatcacatggcagtcaacgcaacaacttgacccatataaaccacttgagggtaaaggtaaacaccttactgttgaggttgtatctttgaactggaaatggttattcatttatccagagcaaggcatcgccacagtgaatgagcttgtttttcctgccaatgtgccagtgcagtacaagatcacctcagaaagcaccatgaactcgttttttattccacagcttggtagccaaatttattcaatggcaggcatggaaacaaagcttcacttaatcgctgatgagccaggtaccttcaaaggtttctctgctaactacagtggtgcaggtttcacaggaatgaagttcgatgccattgcaacagcaactgaagctgatttcgatgcttgggtaaacaaagtaaaaaataccggctctgcactgactaagcaaagctatgttgaacttgcaaaaccaagtgaatacgacccagttaaatactatgccagcgtagataaagatatgttccattcaatcgtaatgaaatatatgcaagcgcatggctctcacggtgcaatgcaacacgctatgccagagcactcagctcataaaaagcacagcgaggacgaggaataatcatgtcgttgttaggtaaattaacattagacgcaatcccgtttcatgaaccaattatcatggttaccatgacggttgttgctgtcttaggtctgttagtggcaggcttagtaacaaaatataaaaagtggggcgtgatttggcacgactggatcacctcaattgaccataagcgtttaggtgtcatgtacatcattcttgcgcttatcatgcttttccgtggtttcgcggatgccattatgatgcgactgcaattagcaatggctaccggcggtgcaagtggttacttaccaccagagcactatgaccaaatctttacggcacacggggtgatcatgatcatctttatggcgatgccgtttatgattggtttaatgaacatcatcttaccgttgcaaattggtgctcgtgatgttgcattcccattcttaaataaccttagcttttggttaactgctggcggtgcaatcctaatcaatatctcattattcttcggtgagtttgctaaaacaggttgggttgcgtatccaccgttgtcagagttgtcattcagtccgggtgtcggggtcgactattatatatgggccctgcagatatccggcttgggtaccttattaacatcggtaaacttcttagcgactgtatttaaaatgcgtgcaccaggcatgacattaatgaaaatgcctatttttacttgggcatgcacgtgggcgaatatcttaattgcagcatcgttcccaattttaacagcggtactggcaatgctgacgcttgatcgttatctcgatttccacttctttacaaatgaattaggtggtaatgcgatgatgtatatcaacttattctgggcatggggtcaccctgaagtttacattctgatcttacctgcatttggtattttctcagaagttatctctacgtttgctggtaaacgcctgtttggttataagtcgatggtttacgcaagcggtgcaatttcaattttaggttttattgtttggcttcaccacttctttactatgggctcaagcgctaacgttaatgccttctttggtgttatgaccatggttattgcggtaccgaccggtgttaagttatttaactggttattcactatgtatcgtggtcgtttacgtattactgtgcctgtcctttggactttaggtttcatggtgacgttcactatcggtggtatgaccggtgtgttgcttgcgattccaggtgctgactacgtattacataacagcttattcttaatcgctcacttccataacaccatcattggtggtgcggtatttggttatttagctggttttgcgttttggttccctaaagcaatgggcttcaaacttgacgagagctggggcagaagatctttctggtgttggttaattggtttcttcgtggcatttatgccgttatacgtacttggtttcttaggtatgacacgtcgcttaaaccacactaacaaccctgattggaacatttggttatacattgcagctggcggtgcggtgatcattatgttcggtatcttgttccaagttgtgcaacttgtagtgagcttcaagaaccgcgagcaacttgatgatacaacgggcgatccgtggaatggtcatactcttgagtgggcatctgcttcacctccgcaatactacaactttgcgaaaattccacatgttgatgacatcgatgcgtggacagacatgaaagaaaaaggcttagcttacaagcaagaagcttcttatagcccgattcatatgccaaaaaatacatcggcaggtgtattaatgagcgcagctttaacaaccttctgttttgccatgatctggcacatttggtggcttgcggcctttggtttactgggtgctatcgtggtgttcattaaacgttgttataccagcgatgttgattactacgtgcaaccagatgaaattgttgaactagaaacggctcacaatacagccgctacgaaggaggtgaatgcatgagtaccatttctgcaggactcgacaccttaaacggcgcacacggtcatgtcgatgcacatgaccatgagcaccacgatacaggtggtaacaccgtatttggtttctggctttaccttatgactgactgcctgttgtttgcatcattctttgcaacctacgcagtattatttatgaacactgctggcggtgtgtcgggtaaagacatttttgaacttgattttgttgcggttgaaaccgcagcactactactcagtagtatcacttttggttttgcgatgatctctgctcacgggcagaaaaaagcggctacgttaacttggttgctggttacctttgcctttggtgctgtgtttattggtatggaagtatatgaattccatcacctaattgcgcacggtaatggccctcagcaaagtgcctttttaacatcgttcttctctttagtgggcttacatggtcttcacgttacagctggtcttatttggatgactgtcctgatgattgaagttgtgcgccgtggtttaaacccacaaacagtgacacgcctaagttgtttaagcctattctggcacttcttagatgtggtgtggatctgtgtatttaccgttgtttatttaatgggagcaatgtaatgagtcacagtgaatcacatgtaattaataacttagaagttcatgcacataatgagcaatcacatggcagcgttaaagactatttaattggttttgtattgtcagtggttttaacggctattccattttgggctgtgatgagtggttcgttttctaaaacgaccactgcatggtgcatcgtgagcatggcgattgtgcaaatttgggtgcatttgaaatacttcttacacctaaacttcaaaacagaagacggcaaagcaagttcattgtcgtttatctttagtgctttaatcatcgtgatggtggttggtttgtcggtgtggatcatctacgaatcaaacgccatgatgatgtactaataacaattactttgtaattggtaaaaagatttacgaaaggagctggttagtttgaggttgtgtctccagttcttacagtctgttactagctagtttctttcgtaatattgcgtttgtgctgaaaattagaggagtcgaggaagtgtttcgacgttatttaaatgtcactaaacctggcattatcatgggcaatttgatctctgtcgcggggggattcttgctagcctctcgcggtgatattgacccatggttaatgatcgcaaccttgctagggttatctttagtagtggcatcaggatgcgcgatcaataacgtgattgatcgtgatattgatgttgctatggcgcgcactcgcaaacgcgtcacagtaactggcgaaatgtcagcaaaggcggctatggcacatggcatcgtgcttggtgttattggtttcggtttattagctgtgtataccaacgtagtggcactcttatttgctacttttggttacgtcatttacgtcggtgtgtacagcttatatatgaaacgtcgttctgtgtacggcacctttgtcggaagtttatctggcgcagtaccacctgtagtggggtattgtgccgtaactgggcagtttgatgctggtgctgtgattttattggtcatgtttagtttatggcaaatgcctcattcatatgcaattgcaatctttcgttataacgactaccaagcggccagaattcctgtgttaccagtagcgcaggggatcgagaaggcaaagcatcacattgttttatatatcgccgtgtatgcgttggttgtgatgttattaaccattagtggttatacaggtttagcctttatggctgtagcttgtacaacgagtttttggtggttgctaatggcgcttcgtggctatcgtcgcaatattgatgttagcggctgggcgcgccaagtgtttgctttttcaattgtaaatatcacggttttgagcattgctatggctttagattaccattcggtagctccacagctacttgttttaacttagaaaaaagttgctaacatatcccaatgttacagtagcaaaggcccggttttttctccccgggccttttttcattgctgatattaaaaacgagcagcttgctcaactacaatgccatggcgagccgctaaacgacgatggtctttatcatagccaccaccaattacggttgcgacaggtacattgtgctcaaggcaacgcttgagaactaaatggtcccgttgcgctatcccttgccagcttatatcaagttttcctaagccatcttgctgccacacatcaacacctgcatcataaagcactaagtctgggtttaaggtgtttaataaataactcagagtatcgtcaacaacgcctaggtattcactatcagcgacattcggtgctaaaccaatatctaaatcgctggccgattttcgaaacggaaaattcttttcacagtgaatcgaacaggtataagcataaggttgatgtgcgagcattgctgcggtgccatcaccttgatgaacgtctaagtcaaaaataagtatattggtcacttcaccactttttattagggtttcactggtgaacgctaggtcgtttaccatgcaataacctgagccaaaatcagtatgcgcatgatgagtgccaccggctaagtgacaagcgatgccatgtttcagcgctaagcgtgctgtttgtaaggtgccaagtggggcggtaaaggtacgtgccattaactcttttgaccaaggtaagcctatgcggcgcatcgctttttcatctaaacgattatgccaaaggtcgtggatgtagttttcacaatgtactaactcaaggggttcaggcgtgccaagcatcggctgagttaggttgtcatttattaatccaaggttttgcacatgctcatataaataagcaaacttactcattacaaagcggtggtttggatcgaagctaaacgaataattaggatgataaaccaaaggtaaatggggatttaactgcatagctcattgaatagctgaatttgctacagcatagcgaatttctgagcagatgtttactctggagcgtgaattaaatgcgctagttctcgatgtaatagtgcttcatcacctaggtttagctcaatgagtcgcttaaggtggctaatactatctatatcaatatgttcgcagcgaagcccagcatgctgatgttcaacatgacacagttcaacttgcatttttatctcaatacttgattcgggtagggtaaaaattaaatcggctttagaatggataggtattaaaaatgaatcacttttagtgataagtgcaccttgtaatgataaatcaagtaactgacagtgatagtcgttaccttctatatgaaggacagctgggcaagaaaatagcaccctagaaaactctctgcgttcattcatgtctctattctccatactttttagcctaaacagtatagttcaatatgaaatgaatgagagaaaacagctgataattactgatgaaagttaatagttatagaaaagccccttaataggggctttttaatatcagctaattagccaatttttttgtatttgatacgcttaggttgtgctgcttcggcgcctaaggttttcttcaaccactcttcgtattctgtgtagttaccatcgaagaagttaatttggccttcgtcacggtaatcaagaatatgtgtagcaatacggtcaaggaaccagcggtcatgcgagatacacattacacagccagggaactctaaaatagcgttctcaagtgcacgtagtgtttcaacgtctaggtcattggttggctcatccagaagtaatacgttaccaccagcttttaacagcttagctaggtgtaaacggttgcgctcaccacctgataggtctttaacgaatttttgttggtcgttacctttgaagttaaagcggccaacataggcacggcttgggaattcaaagttaccaattttcaatacgtcttggccgtttgagatttcttggaaaacagtgttgctctcgtccatgttgccacggaactgatcaacagttgcaagctctactgtttcaccaacaatgatctcaccgctatcaggcttttcttcaccgcttagcattttgaatagcgttgatttacctgcaccattggcaccgataatacctacgatagcgcctttaggcattgcaaagtttaagtcatcgattaatacgcggtcgccaaagctcttcttcaggcctttcacttcgataacttggtcacctaagcgtggacccggtggaatgaatagctcattcgtttcgttacgtttttggtaatcgttttgttgaagctctgagaactgcgccatacgtgctttagacttagcttgacggcctttcgggtttgaacgaacccactcaagttcttgtgcgattgatttttgacgtgctttttcagatttctgttcttgttgtaaacgtaaatctttttgctcaagccacgatgagtagttaccttcccaaggaataccttcaccacggtcaagctctaaaatccaacctgctacgttatctaagaagtaacggtcgtgggttacagcaaccacagtaccttcgtagtcgtgtaagaagcgttctaaccaagcaactgactcagcgtctaagtggttagtcggttcgtcaagaataagcatatctggtttttcaagtagtaaacggcagatcgcaactcggcgacgctcaccacccgaaaggtgttcaatttttgcatcccaaggtggtaggcgtaatgcatcagctgcacgctctaacacgttatcaatattgtgaccatcgtgtgcttggatgatagcttcaagctcaccttgctctttagcaagcgcatcgaagtctgcaccgtccattgcatactcgttgtatacttcatctagacgatttaatgcatttttaacttcgcttaccgcttcttctactgtttcgcgaactgttttgttctcgtctagctgcggttcttgcggtaagtaaccgattttagtgcctggttgagggcgagcttcaccttcaaagtcttggtcaacaccggccataatgcgcagtaacgtcgatttacctgcaccgtttagacctagcacaccaatttttgcgcctgggaaaaagtgtaaagaaatatcttttaagatagtgcgcttaggtggcacaaccttagatactcgactcatcgagaatataaacttgtctggtaacaccatgaaagaagccttcaatttataataaaaattaacagcaagtattgtatacccaaactacctcaaaatacagaattcagcgtttatgataggcttaatatcaaggtgttatttactcaaagagtcatacattttaattaatgaccactcagaaatatcacttcatttggacatctaaacatctagaggttgaaatttctaactatccgttcataattagcactctaatatgtatgctcggagcccgctatgcccattacagtaaaagatgaattgccagccattgcaaagttacgtcaggaaaacgtgtttgtaatgccaaaaagccgtgcgaaaacgcaagagattcgcccaatgcgtttggccatcttaaacttaatgccaaacaaagtagaaaccgaggtgcagtttattcgcttactagctaactcaccgctacaagttaatgttgagctgttgcgcttggatacccaccgcagcagtagtaactctgagcagcacttagatacgttttatcgttatttttctgaggtaaaagacaataactacgatgccatgatcatcacaggtgcgccgcttgcacatttagagtatgacgatgttgtctattgggatgaacttaaagtgattttagactgggctgagcagcatgttacctctacactgttttcgtgttgggcggcccatgcggggctttatcaccactatggtcttaagcgtgaacttaaaccaaataagttaagtggtgtatttacccacaaaagctattttgaccacgcagcactcacccgtggctttgatgatacctttttagtgccacactctcgctatggtcatattgatattgataagatcactgcctgtgatgatttggtggtgttagctggttctgagcgagttggtgcctatttaattaagaataagtctggcagccaagtgtatattacaggtcatccagagtacgatgcgcataccttaaaagaagagtacctgcgtgatagcgagaagtctgcagacgcacctaaaccagaaaactatttcccagatgataaccctgataacgaaccatcgaaaacatggcaaagtcatgcctttttattgttttcgaattggttaaactattatgtgtaccaaactacaccgtatgatattaacttagttagccaagacgtaaggactaacaactatgccgagtaatgcagtgaataaacgcgaacaattgaccgaggcgctgaaacagcgaattttaatcctcgatggcgcgatgggcaccatgatccaagaacataaattagaagagcaagactatcgcggtgagcgctttaaagactggcatgtacttattaaaggcaataatgacttattaagcctgactcagccaaagatcattgctgatattcaccgtgcttacttagaagccggtgccgatatcatcgaaaccaatacctttaatgccacgactatttcgatggaagattatgatatggcgagtcttagtcgcgaaatcaacctcgagtcagcgaaacttgcgcgcggcgtgtgtgatgagtttgaagcaaaagatccaagtaaaccgcgttatgtagcgggtgtgcttgggccaacgtcaaaaacctgctctatttcaccagatgtaaatgacccaggttatcgcaatatcaattttgataagctggtggctgcgtatgttgagtcgacactagcactgatggaaggtggtgcagaccttattttgattgaaaccatctttgatacgcttaatgcaaaagccgcttcgtttgccgtagaagaagctttcgagcaagctggtcgtagtttgccagtgatgatctcaggcaccattaccgatgcctctggtcgtactttatcaggacaaaccaccgaagcattttataactctattcgccatattaaaccgctctcaattggcctcaactgcgcccttggtcctgacttactgcgccagtatgttgaagagctatcgcgcgtttgtgaaacctttacctcggtgcatccaaatgcaggtttaccgaacgaatttggtgaatatgatttagaagcccctgaaatggctaaagaaattatcgattggggcaaatctggctttattaatattgtaggtggttgttgtggcaccacaccggctcatattaaggcgtttgcgaaaggcctgagtggtgttaagcctcgccaactgccagagcttgaagtgcgtatgcgcttatcgggccttgaagcgtgcaacttaaactaggaaaccgacatgactgaccaaattgctgtatttactaacgtcggtgagcgtaccaatgtaactggctcggctaagtttaagcgcttgatcatggaagaagattacgagaccgctctcgatgttgcccgtgaacaagtagaaaatggcgcgcaagtgattgatatcaacatggatgaagccatgttggactcaaaagcggcgatggtaaagtttttaaacttaattgcctcagagcctgatatctcaaaagtacctatcatggtcgactcatcgaaatgggatgtgattgaagctggcttaaagtgtattcaaggcaaagccattgttaactcaatttcacttaaagaaggtgaagagccattcatccgccaagctaagctaattaagcgctttggcgctgctgcggttgttatggcgtttgatgaaaaaggacaagccgaaactgctgatcgtaagttcgagatttgtcagcgtagctacaaaatactcgttgatgatattggctttccaccagaagacattatttttgacccgaacatttttgctgtcgcaacgggcattgaagagcacgataactacgctgttgagtttatcgaaggtacacgtcgaatcaagcaaggcttaccgcattgtaaagtgtcgggtggtgtatcgaatgtgtcgttctcgttccgcggcaacaacccagtgcgtgaagctattcactcagtgtttttataccacgcgattaaagcgggtatggatatgggcattgtaaatgctggccaattagcggtttacgacgatatccccgaagagctgcgaaaagctgtagaagatgtgatcctcaataccgacccaggtgctggtgagcgacttgttgaacttgcaccaaaatactcaggtatggcgcaagcagagaaagtagaagatttagaatggcgtacttggcctgttgaaaagcgccttgaacatgcgttagtaaaaggcattaccgagtatattgacgaagatactgaagagtgccgtaagagcaaagctaagcctatcgaagtgattgaaggcccgctgatggacggcatgaacgtagtaggtgacttattcggtgcaggtaaaatgttcttacctcaggttgttaaatctgctcgtgtaatgaaacgcgccgttgcctatcttgatcctttcattgaagccgaaaaagaagagggcgcaaccaacggtaaagtggttatggcaaccgttaagggcgacgtacacgacattggtaaaaatatcgtaggcgttgtactgcagtgtaataactacgaggttatcgaccttggtgtgatggtgccggcagagaaaatcttgcaaaccgccattgacgaaaaagccgacattattggtttatcagggctgattaccccatcgcttgatgaaatggtgcatgttgcgaaagaaatgacccgtcgtggttttgaattaccgcttttgattggtggtgcaacaacgtcaaaagcgcataccgcggttaaaattgaacctcagtatgataaaggtgtggtttacgtaaataacgccagccgtgctgtgggtgtggtttctaatttattgtcgaaagagttaaagccagcatttttagagaaaaccaagactgagtatgaaaaagtacgtgaacaacaagcacgtaaaaagccgcgctcaaaacccgttactttacagcgtgctcgcgacaacgctgtaaaacttgattgggacaactacacaccacctgtgccgaaaaagctaggtgtcacagagtttaaagatgtttcgattgcgacgttaagacagtacatcgactggacaccttatttcatgacgtggtcaattgcaggtaagtacccacgtattcttgaagatgaaatagtcggcgaacaagctaaaagcttatttgctgatgccaatgcaatgcttgatgaacttgagcaatcaggtgcgctacaacctcttggtgtaattggtttattcccagcaaaccgagtaggggatgacattgagatttacaccgatgagtcgcgtacaacgcttttaactacatcgtgtcatttacgtcagcaaactgaaaaaaccgactttgctaactactgcttagccgattatatcgcgccaaaaggcacccctgattattttggtgcttttgcggtaactggtggtcttgaagaggatgaccttgccgatgccttcgatgccaagcaagatgattacaataagatcatggttaaagccgttgctgaccgtttagcagaagcgtttgctgaatatttgcatgaacaagtgcgtaaagaatattggggctatgcggtagatgaaaatctatcgaatgatgaacttattcgtgaaaactaccaaggtattcgcccagcgccaggttatcctgcttgtcctgagcataccgagaagaagaaaatctggcagttacttgataccgaacagcgtattggcatgaaactaaccagttcatatgcaatgtggccgggtgctgcagtttctggttggtatttctctcaccctgaagcgaaatactacgcagtggcgcaaattcaaaaagatcaggttgaagattacgctaagcgtaccaacatgacacttgctgaagctgagcgttggttgtcgcctaatttgggctatgagccagaataataacctttagtttaaattaaaaacgagcctcaaatggctcgtttttttatgtccatttttttcatacttttttctttttaattgctttagtactggcaaattccttctaatttaaatatttgtgttaaagttattgaggttgagcaaggaatctaaggtgaaattgtgattgatactgtgaatgcaagcgagagagataaagcgcgattcttacgcgtatttgcatttattggtgcagtgacctctttgttgatgtcggtcacaagttatcaagatggctacatcgcattaagttatttattaattgttggcgttgttatttttgctttgccttttttaataaaggggcgtgatcaatttatttcagtactcatgctgtacgcactttatgcaatgatgtgcttcttaactgtctcgggtggcagtaatggcacagggccgttatggctatttattgtatctcccgtgaccttttttattcgtggcttaaagcgcggagcgttcgatcttatcctgcttgccattattatctcagtgcttttctattttaccgatcaatttggttattacagttattcgagtcattactttccaacacgggtcatgctgtgcttctctattttatgtattttgggtggcttctacgaatattaccgcaacaaatacagtttagagttaatgaagcaacttaaaattaatcaaaagcttgcacgctatgatgcaatgactgaacttgtaaatcgtcgctttgcaaccgagtgcttacaagataaacgctttggcgaaggggctgtgttcttgctgatggatgttgataactttaaacaaatcaacgacacctatggtcatcaagtaggcgatgaggtgctaatatttttcgctgatgtatttaataaagtgtgcacagaagaagatgtcatttcccgttggggcggcgaagagtttttaattgttattcctgcggggaatgaacaacgggcctaccaagttgcagacaacattcataaaaagctcgctgaaaagccattcactagtggtcagcatcgttttcatgtcaccttaagtattggcttataccaacgcgtgccagatgagagtgttgatcattgcttaaacattgctgataagcaactttaccgtgctaaatcgcaaggtaaaaatcaaacggttgctgaagtcgatttagcaaagcacgagcctgcttgataaataaagccgcaattagcggctttatttattgctcaaattaatggcttttttcaaagtcgctgacttcacgctcagcttcttctttcgatttaccgtatttttgctggattttaccaacaagctctttacggctaccctcaatcacatctaaatcaccatcagtaagttcgccccatttacgttgcgctttacctttaagttctttccaattaccttctaaacgatcgctgttcatcataatctccttactttgttaaacattcgtgttagtaaaagcaatcgttatgccactccaaccttgtaagtaactaattgatattgttaatttttaattttttgtgttatgtggtggagttatctaattgcaatttgtacctgtttaaaggttgaagcgtgtaattatttcatgcaatttaaggctactcatccctgcctgtaattttttgatacaatgcgcgaaaagaaagtaagagatacctaacgtgctgccagttgaagatatttatcaatccctgttaacaacattacagagtaaccctatggccttattgcaagcgccaccgggagcgggtaaatcaacatggctacctcttaccttaatgcgcgaagagcactttaaacgcattgttatgttagagccaagacgactcgccgcacgcaatattgctcagtacttggcaagtcagcaaaatgaaaaagttggcgacagtgtcggcttacgtattcgtggcgaatcaaaagttagttctgcaactaagcttgaaattgtcaccgaaggcatgctgacgcgtatgttgcaaaatgacccagagcttagtgatgtagacttacttatttttgatgagtttcacgagcgctcaattgccgcagatacggctttggcatttgccctcgaaacacaggcggcacttcgcgatgatttaaaaatcttactgatgtcggcaaccttagacggcgatcgttacagtgagttttttagctgtcctattatctcatcacaagggcgaagctaccccattgatgaagtttacattccacttaaagacgaaagccgctggctcgatgacatacctgcagttataaaacaggcgcttagtgagcaaacgggcagtgctttagtattcttaccagggcagcgtgaaatcattcgggttcagcagtctctaaacgatttaggtgataatgttgagatatttagcttgtatggtgagcaaaataaaaatgagcaacaagctgctattgcgcctgctaaaaatggcaaacgtaaagtggtattaaccaccaatgtggctgaaaccagtttgaccattgaaggaatacgcattgtggttgatagcggtaaacgtcgtgctgccagttttaatttaaaaacgggtgtgacagagcttgttacgcaaagtatctctcgttcttcagccatacagcgcgctggtcgtgctgggcgcattgagccgggggttgtgtatcggttaggctctaagcaaacctttgagcgccgcaacagccatgatgcgccagaaattctgaccagtgatattagtcagttgttattagaggcaaagcagtggggggcatcacttgctgagcttagcttgctcgatccaccaagtagccagcaggttaaacaggcaacggcacttttgaaaatgctcgaagccattgatgaaaatgaaaagcttacttcgcttggcagccaaatgctgagctatggagccgatattcgcctctcgcatatgctcattaaggcaaagcaactagagcagcgcatgcctggtatttatgtattagcggggtatttaacggcactgcttgaaagccgaattagtatgccagctgatcttaatttggcattgcatagccagcacagcaaacctcacccagtatttaagcagcaattaaattattggctatcacgcttgcaactcaagccggttaatgagcttaaaacagagtacttgtcgctgctggtggcgcttgcttttcctgaccgcctagccaaaaagcgcgggaatggttatttacttgccaacggtgcgggcgccgacttaagcgaggagttttggcataacgatgattatattgccattgcgcatatgggcggccacaagggaaaccgtgtttttgctgctgttgcctttatgccaagtgagcttgaagatgagctttcgcatttatttactgagcaaactcgctgcgaatacgatgaaaaagcagggcgatttgtccatcaagatgagcttaagctcggtgctatcaccatagcgagtcagccaagtaaacaccccctagataagagcgagcgcactaaagcgtggttaaatttatttagtaagcagggcttttcgctatttaatgatcagcctgacagtgagcagttacttattcgaatgatcttggcaagtaagctgttaccagaatcattcccacttttaaatcatgatgaattaattgccgataaccaatggcttgcaccttatttggatgatattaaaaaccttgagcaattaaaaaagttcaattacaacgaagcgatcaaaagctgttttgattggcagcagcaaagcctattgaatgaacacctgcccttacgattaactgtgccaagtggttcaaatgtaaaagtgacctatcagctcgatggcccagcaaagctcagtgtgcgcatgcaagaagtgtatggcatgaccagcacgcctttgctggctcaaggtaaactgccattattaatggagctattatcaccagcgcggcgaccgctgcagctaacccaagacttagctaacttttggcaaacgagttaccgcgatgtgcaaaaagaaatgaaagggcgttatccaaaacatttttggccagacgaccccgcaactagtcaagcgactaataaagtaaaaagtaagatgtgattttaatgaagtaagtgattaagtttgcagtactttgggttgatcttaagcgattgcttccagccctttttgctctgccagagtgagcattttcaatgctgctcctcttggtgagctatcaccttgctcccattttttaactaacttgtcactgacatttaagtattgagcaaagaccggttgagagaggttgtacttcagtcttaaattacgaacttgttcgggggtaaattcatgaacatttgtaaggcacaatgcgtcaaatttacgcatagtcgttttgtctataactccagacttttttaatccactcgctgttttgtgaactgactttaatatgtcactcatgatcatcacctacaattaaaagttcgccatcatcgactagttgctcaagttcactttgggaaaaacgaataaactcttttgctaactcttttaatgctaacttttctctagcatttatattagccctaacgtttttagcaaacgcgtaaagaaagaaatatttatcaccaattacagccccgacgatagttctataacccgctctttttcctttactgcccatggctacgcgctttttataaacattaccacctaggtctgcatcgtaaaggcctgctgacatctctttgcaagcgtttattaaatcaatatcagacaaactttcttttttcgtgcgcgaaacaaaatcctttgttttataaatcatagtatactccattagggtacactttcaatgttccactcagtagcaaatcaatgataatggagttttcattggtgtccctctaatgttgatagcagaagtaatgggtgattaccagctatctatctgagcaaaaccaatacgaataaaataaaccgttacaatttctagccttgttttggtttctcttttgttggctgtttagtagtctaattgactcattaataaaaagagaaagccggtgtctgaagctattacccttgctcaatacgttaaaaaacgtacaggtgtgcctcttgggcataaagattcgttgcgcaatatgctgacacgttctctaggtgctagctcattttatttattttggcgatattggaatccggtgtggagctattacttatctcggtatgtaatgaagccttgcaatgacattatgccggtttggtgtgctgttgttgtgacctttgctgtaagcggtgcgctgcacgatttagcagtcagtttagtgaagttaaagccaatattcttttttactccttggtttactgtgatgggcgctttggtattagtaagcaagtacagccaaatacagtttagctctgctccatggtggttaagagcgctcgccaacatcagctttattgtactgagctattggttgacgagccaccttttttagcgcgttactgcgttgctaaagggtagtctgtgtagcctttagcaccgcctccaaataaggtatcaggatcgtgctgtgcaagctcaataccttgctcaatacgcgcaggcagatcagggttggcaacaaacgggcgaccaaaacctattaaatcagcccagcctgcggccactgcttgctctgctttctcgccagtgtatttgcctgcataaatcattaacccggcatagttttcacgcagagcttgcttaaaactttgctccattaaaggcgcatcatcccaatcagcttcggcaatgtgcagataagcaacgttaaggtcattgagtacttttgctgcgccaatataggtttcgaacgggttatcatcgaccgtaccattgagggttgtgagtggagcaaggcgcacgccaacacgctcagcgccaatttcatcacataccgcttgtgccacttgttgtaaaaagcgtaagcggttttctaaactgccgccgtattcatcagtgcgttggttcgactctgaatcaataaattgattaattaagtaaccattggcagcgtgaagttcaataccatcaaaccctgcatctacagcattacgggcagcttgacggtattcgtttataacctgtttgatgtcgtcatggctcattgctcgtggctgtgctgtggcaacaaaatcgggtttgtcatcttcatcaataaaaactttaacgtctttagctgcaatcgctgatggcgcaattggttgctcgccacctgtgttacttgggtgagacacgcggccaacatgccaaagctgagcgaacataacgccaccagcttgatgaactttgtcggttactttcttccaacctgcaatttgctcggcagtgtaaatacccggtgtccaagcataacccttacctagggctgatatttgtgttccttcgctgataattaggccggcgctggcacgctgggcatagtagtcggccattaactcattggcgatatcacccggttgtgatgagcgagagcgggtcatcggtggcataacaatgcggttttttaatgtatgaccggcaagttgtacggtatcgaataatttgttcattacggctccttgaaagcgaatatgctttcagcataacgaaaatcatttatgaaattaatgccactaatcacaaaacacttttgttaaaagtgcaaaaaattaaagcgttaacctgggtgctataaagtctaaaaacgctaatactcgtgatgacacaccgctgttttggtaatacaccgcatgcactttttcgcggcgattagggctcagtacctcgccttcaagcacttttactaaacggcctgcttttaaatcttcgttgatcataaattccgacaacaaggtaatgccatgaccttgaatacaaagctgacgcacagtttcaccacttgatgcactgattgaaaatttcaggtctaacggcgtggttagcggccagtggtttaaatgtggcgcatcggtaaaaccaataagctggtgcgaggctaagtcggttagctcatttaatggtggcgccgcttttaaataatcagggctggcaacgagctgtagtttgctaactcccaaagtgcgcgcatgcaagtttgagtcagcaagctcgccaatacgaatagcaatatcggttttatgctcaagtaaatcgataatgttgtcgtggctggtgatctcgagttttatatcaggataagtttggttaaaggcttttaaatgtggcgctaattgatgaaacacaaaaggacttgcggcatccactcttaattttcctgatggggcgcagtgcagaagctttaaggcctcttcgccttgtgcgagctgactcagtgcttctctagcatagcctaaaaataactgaccttcttcggttagctcaatgcgccttgtggtgcgattgaataaggtaacatttaaggatttttcgagccgagttaccgcccgtgatatttttgctacttgttcatccaaggcattggctgcacttgaaaaaccaccggtatcaaccacgctaataaatgcttctaaatcttgggtgttggagatcacgctcatggttttaccttttcatttttgacaaaagtattttgtcactactgctattttttgcaaatttaattttagccacaatagccgcactttcaaaattaaatagaggatttgtgatgccaatagcattactagcgttgactctcagtgcgtttgccataggcaccactgagtttgtgattgtcggcttagtgccaactattgctgatgatttagctgtttcgttaccgagtgccgggctacttgtaagcttgtatgctttgggtgttgcggtgggggcgccagtattaactgcgctaacagggcgatggaatcgaaaacatgtattacttagcttaatgagcccatttgtaatcggtaatttactggcttggcaagcacctagttatggcagtttgatcacagcaaggattctaactggtcttgcccatggggtgtttttctcaattggttcaaccatcgcaacagggcttgtcagtaaagataaagaagccagtgctattgcgattatgtttactggtttaacggttgcattggtaaccggtgtgccattagggacttggattggtcagcactttggttggcgagcgacctttttagtggtgtctttactgggcataattgcacttgttggtagcgcatttttaattccgagcaacttaaagcaaagtaaaccggctactttgagtgagcaattaaaagtaatggtgcaacctaggcttttactggtgtatttgatgaccatacttggttatggcggcacatttactgcttttacctatttagcgcccattttagagcagcaaactggatttgcatcagccaccattagcttaatcatgctggtttatggggtatcggttgctgttggcaatatctacggcggtaagttagccgataaaaaaggccccattagtgcgctgactattatctttagtgctttaagtattgtgctgttagtgctgacctttaccatgcaatctaaagtcgctgcggtactgaccatacttgtatggggggcatttgcgtttggtaatgtgcctgggctgcaagtttatgtggttaaacttgccgaaaagttcacacccaatgccgtcgatgtggcctcagggttgaacattgcagcgtttaatatcgggattgcgctgggctcagtgttaggtggtgttgtcgttgaaaactactcattgcaagacactgcttggattggcgctatcatcagtttagcggcgttaattgcaacacgatacagcggttatttagataaacgtgagatcataaagctacaaacagcttaaaactaaattgttgatagttcggtgctttgccgttattttaggttcgtagtttgattattagtcaataactaaaaccacaaggaataacgatgaagcccctttattttctagctatttgtttgctaagcacatttagcagccaagcaaagcaagctaacccagagctcacagcattagcacagcagtactttaataccatggttgcaacacaagcacctaatgcgactaaaaaagagttagaagcttttttagctttattaactgacgatgtagcaaatcaacacttaccttatcaaaccgatgattcaagagaaccagatggtaaagccatgatgcgtaaaggcatgactttttaccttggtgcgcacactgaataccaagcaaatttactcgatacctttatttttaatgattctgccattgctttacgttatacccatcatgctaaaggtatacacccgcaaaaccagcaagaaattgaatacacgcaaaccattatggatgtgctcgaaatagaagatggcaaaatagcggttattcgtaaataccacgaatgaactttgctttaacacgagcgcttttataagcgcttttttattaaaaatacccccgcaataaattttctattttttccgcattccagcctaaattaatactttttaggctttattttgaataaatttaaaacttttttatatatcgaataataaacgtaagaacagtgggttagcttaatttacgagtgtagctttgcggctgtttacaatttgtcaaccttgaattgccatgctgattaccttaacctttattttaattgaacgttcaatcaataaaaaattatgccgaaagttggaatggaacctgttcgtcgtcagcagttaattgacgccacaatagagtcggttgcagagcttggtttgcaaggcaccaccataaatagcattagtaaaaaggcaggcttatcgtctggcattatcagtcattattttggtggtaagcagggcttaattgaagccactgtgcgttatttattgaccagcttaaagcaagcacttttgaatcaagtaacgccacaaactagtccagagcaacgattaatgtttatcgttgaagcaaacttttcgcgtattcagcagcaaagcaacaacaccaaaacttggttgagcttttgggcgcactcaatgcacgacgcccagttgcatcgcttacaaaacgtaaatagtaaacgtttatttagtaacttattaagctcattcaaacagttaatgagcgatagcgatgccaatttagctgctgagctaagtgcagccatgatcgatggtttatggctaagagccgtattaagtaagtcagaccaagatcaattcgaaaattgtgagcgattagccaaagactacattcgttcactgataaaacagtatggagcctaaaatgaccacacctgtttacgaaaattttattaatggccattttttaaagaatcaatctggcgatacctttgccgttaagaatcctgcaacggatgaagtgatttatcacgttgaaatcgctgatgagtttattcaaaacgcggcaatcgaaagcgcaaaacaagggtttgcagcatggtctgcaatgacaccaattgagcgtagccgtattttattaaaagccgtcgcaatcttacgcgaacgtaacgatgaactggcaaaagtagaagtacttgacacgggtaagccatggcaagaagccgagtgtgtcgatgttgaaactggcgccgatgttatcgaatattttgctggtcttgctcctgcgcaagtgggtcagcaacaaatggttggcaatgacttttactacacacgtaaagagcctttaggtatctgtgccggtattggtgcatggaactacccactacaaattgcttgttggaaatcaggcccagcactggctgcgggtaatgcggttattttcaagccttctgaagaaacaccacttggtgcaattaaacttgcagagattttcatcgaagcgggtgtacctgctggcgtattcaacgttgtgcaaggcgctgctgaagtagggcaatggttaacagcaaacccaaatattgaaaaagtgtcgttcactggtgaagtaggcacaggcaaaaaagtaatggcaagcgctgctggttcacttaaagatgtgaccatggagcttggtggtaagtcaccgttattagtatttgatgatgccgatgtatcacaagctgttagtgcggcaatgttaggtaatttttatacgcaaggcgaaatctgcactaactgtacgcgcatttatgtgcataaaaatgtttatcagcagtttattgatgagctgaaaacacgcactgagcaaaatattatcgctggcgatccaatggatcctgaggtgaatttaggggcgcttatctctaaaaaacaccaagagcttgtacttggctatatcgataaaggtattcaagaaggcgcaaccttgctaaccggcggtaaggcactgtcacctgcatctgcaccaaacggttactttgtggagccgaccgtttttgtcgactgtaaagacgacatgaccatagttaaagaagagatctttggcccagtaatgagtgtgttggtgtttgatgatgaagatgacgttattcagcgtgcaaacgatacccacctaggcttagccgcaggcgtgttcactaaagatattcagcgcgcacaccgcgtgatccatcaattacaagccggtatttgttggataaacagctatggtaattcacctgctgaaatgcctgtaggtggttacaagcaatcaggtattggccgtgaaaacggtatcgaaactttagatcactatacccaaactaaatcgatttatgtgggtatgagcaatatagagagtccattttaatgagtacacagaactatgattacatcatagtcggtgctggctcagcaggctgcgtgttggcaaaccgactatcagcagacccttctaataaggtgttattacttgaaacgggtggtagcgataaaagcatttttataaagatgcctaccgcgctatcaatcccaatgaatactgacaaatatgcatggcaatttcataccgagccagagccgtatttagataaccgtcaaatgcactgcccacgcggtaaagtgttaggtggctcatcatctattaacggcatggtgtatgtacgtggtcatgccaaagattttgatgagtggcagcaacatggtgctaatggctgggattaccaagcttgtttaccgtattttaaacgtgctgaatcattctatttaggtggtaacaactaccgtggcgataacggcccattaggggttaataacggtaatgaaatggctaacccgctttataaagcctttatcaaagcgggccaacaagcaggttatgcgcatactgatgactacaatgcagcccagcaagaaggttttgggccaatgcatatgacagttaaagacggtgtaagaagctcagccagccgtgagtatttagacccagttaagtcacgtaaaaacctaacgctagtcaccggtgccttagctgaaaaagtattgctagaaggcaaaaaagccgttggtgttgagttttcagtatcaggctctaagcagcaagcatttgcagctaaagacgttattttaagtgcgggtccaattgggtcaccgcatattctgcaactatcaggtattggtgataaagacatcctgagcgaagcgggtgttgaggttaaacatcacttaccaggtgttggccaaaacttacaagatcacttggagttttatttccaatataagtgtaagcaaccaattactttaaacggcaagttaggtcttgtttcaaaaggactaattggtgctcgttggttattaaaccgctcaggtttaggggcaacgaatcactttgaatcatgtgcatttattcgttcaaaaccgggcgttgaatggccagatattcagtatcactttttaccagctgcaattcgttacgacggtaaaagtgcctttgatggtcatggtttccaagttcatgttgggcataacaaaccaaaaagccgtggtgcagtaacgattaagtcagcggatcctcaggttgcgcctaagatccaatttaactacttacagcataaagatgacattgaaggctttagagcttgcgtacgtctaactcgcgagattattgagcaaagtgcgtttgatgaatatcgcgatggtgaaattcaacccggtaaagatgttcaaagcgatgaagaaatcgatgcttttgttcgtcaagcggttgagagtgcttaccatccgtcatgttcgtgcaagatgggtgaagatgagatggccgtggttaactcgcaaactcaagtacacggtatcgaaggtttacgggttgtggattcatctatcttcccaaccgttccaaacggtaatttaaatgcgccaaccattatggtggcagaaaaagcggcggaccacattttaggtaagcctgtgttatcggcatcaactgcagatgttgccatggaaaaacaatggcaatcaacgcagcgtagttcggagatctaataaggccacccgcagtttcggctgtggggcttgcagtggcgcgcatcacgagttgtttgtggtgcgttaatgcgaggaataaaactggagaaacaatgaagtattattacttattttgggggggtaactatgaccttttggcttagtgctggcatcatttttaccctgttagcaattgcggttattttatttaaatggggtacggtaaggtgtgttggcgtcacaccggttagaacgtttacgttcattgcaattttatttacatcgggcctagatgttggcttgattatgtttccactgacagagtttgcaggttatgcagacataaaagcaagcccagagtatgcgtttgccaatccattagccatcgagtttggtttttggggcttcttgatctggggattttatttccttacgtgcttttatttctgtgtaatagaacccaaagtaaagttctttgaaattgctttggtaaaactaattaataacgttgttattattgggacatgcgcatttactgcatttttactgctgtcgaatttgccttggtatttaccgtcgctcggtgatggcgagtcaattattccgacattctacttaatggtgtttgcagcgatttgttttgctgtgtattcaagcacagacattaagtatgtacgctttttaagtatttcgactacttggttgtttatcgctttaatcacatttatgtggttcggtgcctttgttgggtctgatgcacaaacatcagcatttgttgataaccttacgttgatcggtggttactttggcaacatcaatgagtttgtattaccactgaatgattaccatgccttctacctgttttggtggtttgcttggagtattatgattggtcaatttacctcgcgctttgtgggtggcttaaaaacttaccaagtgctggcggctatgttgattttcccgtctattccaatcgctatctggtttagtgttttgtatcaataccatgaagcgggtattgcaacagcaggcttgaaaaacatcgctatggtgtttgttggtgtggtgtttgtgatcaactcacttgattctttgatccgtttatacacagataacctaaacttaacggtgaaacgttttggtaaggttaattatattgtcttaaatgtggtggcgctttcgttattaaccctgctgtttaagttcgactttttacagatccaatgggttggcgcgctagttattgcgttatttttcggctgtgctgcctttattggctacagcaagttaaaaacagtgaaaaatatcgaaggttcaccaaaagacaataaattagattacacaaaaatagaaacagttagctaagggaaaccaacatgacaacaagacaaacagtattagcagcagcgttgccattggcattactatcgacatcagccatggctgacttatctactacggttacattggcatcagattacaccttcaatggtgtcagccaaaccatgaatgacccagcgattcaaggcagcttagattatgcctttgcagattcaggtatgtatgtaggtacgtgggcttcaaatgtagattttggcgatggcactgacattgaatgggatgcgtattttggtaactatgctgagttaacggatgcccttagtgttgattatggtattgcttactactcttaccacggtgaagattactcaagcgatggcaactacccagaggtgtattcgaaatttggttatgccagcagcattgggcaagtagagcttaatttttggtatacttgggactattttggtactggtgcaggccatttaatttacatgctagcgcacacatttgaagtagcgccaaaccatgcaattcgtgccagctttgatgtatctaattcattagatggcgataagtttagttgggatggcagcgataagtcatataagcattatcgtctagcgtatcaaacgagctatgcagggtttgatattgaaattgcaggtgagaataccagtattgattctgagtatgcagacgagcgaattgtcgcgtctatttcgcgtagctttgatttgtaagcactgctttaataaaaaaacggctaaccttggttagccgtttttttatgcctagaatctgaaagttaaatctcttcgccttcgtgttgcatcgctaaatcatcaagctctgcaagagtgtaatcaaagccactggtatcgacttcgtagcgtatttttacgccataacccccttggcaaagactcgcagtaactttagccactgaccagtgcttaagcttgtttaaaaaccgattggcggtttgctgtgagtcaaagcgataactgacttgcgattccatcttttttctagcctaaaattttttcgagagtgtatgaaattgctctgtttaaatcaattgctcattgaaaaacgccaatgtgcgctgccatgaaagctctgcctgtttttcatcataacgagaggtagagtcgttatgaaagccgtgatttgctttttcatacatgtgcatagtgtaaggcacttgatgcgcttttaagtcgctttcgtagtctggccaagttgcattaacgcggttatcaaattcagctaagtgtacaagtagcggggctttgatattttttctcagctctttaacggcaggagtgccgtaatagggcacgcccgcattaattaatttgctatcaactgctgcaaggtagttaaccatataaccaccaaagcaaaagcctaccgcaccgagtttgccgttactatttgggtgtttttttatgtattcagctgcggcaataaagtcttgttgaattttttctttatccatagagcgctgcatggcgcggccttcatcatcattaccggggtagccaccaagagggtgtaatgcatctggcgcaaaggcaataaaaccggctttagcaaggcggcgagcaacatctttaatataagggtttaagcctctgttttcgtggatcactaacactaatgggtgcttacccgttaagttagcgggttcgactaaataacctttaccttcgccatggcctttaaacgagtcaaaggttttatagctggctttgatatcagggtcattaaaggatacttgctcagctaatgcgtagtttggcagtaaagcgctacttagcattgccattgaataaccaagggcgactaagccacccagttttttcataaaggtacgacggtccattaagccatgggcgtattcatcgtaccaatcgaaagcttcttggggaatgtggttatggcgttgctcagtcatacttatatcctttaaaaacgagttaggtttataactttagttgaaatatcagcgattaacagccagttgctttgtttgtattaccacatccataaagcggcgctgccaaatggctttaaaggctttgttaaataggtataaaaatattagcggcattaataacagctttaaaatcagtagagacaagatattcaaaaagtcgataaataagtcttcgacggctgccaccatgttactaatgccagaggtgacggtgtctataattttactcacttgcgacgattggtcttgattgagtgatgcgttaaggttttctagttgttcgtttaaggcgtctttgtctaggttcagctgtctttgttgtttcagtaccgcattaaactgcgctgttaattgctgctttttatcaagtaatggcttggcttgttcaagctcagtaaaggtcagtcgctcagacaagctgcgagttgcttgaatcgcctctatttggctatcaacctctgccagcttaactttgagttctgtcgcttgctggtggttttttatctgctgctcatttaatagtgagagcttgtcgaagatggtttgtttttcactatcgacctcggcctttagcttggcagatagggcagaggtattatttgcactgctattcaccgtctcgactttttcgctcacgatttcactttgctggtttatttgctcatctaagaatatttggctcacgaggcctgttgtaagcaccacagcaggcactaaaaagcgaattaaaatcagactcgccataattttatgacgcaagttaggtaaatagttacgccactcacatataaagtaagcgacgaccgagagagtaaaagcaccactaaaaataacccccgaagaaatggtgtataaaatgcgctgtaaaaataacgagcctattgcaaggcgcatagcatccgacatgtattcagctaggtcatttactgggtcgagtagttgtgcaggttgaatactcgcaataccaatgcccacttcggctgattgcaacagcgatatagcagcattaactgtacgagatgaagcgtacactagggttgattgtacaagggcgctgtcgataaagcgcataatgaaatggttataatgctctagccaacaaagaagtagcagtattgtaagagataaatacttgataatatgttgtttagttagcataacgcccccgacagttagtaagcttcttcacgctacactattcatagccattgaagcaatctaataggattgaattattttgccgattaactgtctatgaattgctattaatcgctttagaggaaatatgaaagaacctgcatcaattggccagtgctgtattgaagatttagacccagtgcaagacttaggtcgcttagtctcttatttgcgttcaaacctggtggctcatcttgatgatgctttagaggataaagagctaacgtcggcccaatacatagtggttgtgctacttgcgcgtggcaaagtaaataccttggccgagctttgtgagcacatggtgtatgaccgtggtgccatgagtcgattactttctcgtttagaagataagggcttagttgctaaaaagcagtcagttgaagatcgccgttcaactcttttatacctgactgaaaaaggccaacagctctatccagaaattttaccaaccgtgaatgatatctaccgtaaagcactcacaggtttctctgatgacgagcaaaagcaacttgctagcttgttgtttagagcaattcataatttaaaagcataaatttctataagcggtacgttgtcgctgttagcgcactttgataatatagttgcctaggcatttaattttaacaagtccgggttgttatgttcgaatcatctttgcttgcacagcttcacgctcaatttccagctcatcaatttaacccagaaggtttgtcggttgttcacacaggccgttttgccaatgccattgtttatcgttataaagacgcgcaatttgacttaattattaaagactttcagcacagcccatggtgggtaagaaaaaccatcgcgccgatttttatcaatcaagagtacaaggggctggcacgcctgcaagacgtagatggagtagtcgataacttttgtcgtttgtcatcaattgctattgcttatgattttattgaaggcacgccacttcgccagcttgtcatgcaacagcagcatttatcgggtgagttctttaaagagtttgagcgcttagtagcaaaaatgcaccgccgcggcgtggtgcacctcgatttacgtaatttgggaaatgtgatttgttcgacagatggcaagccttacattattgattttcagtcagcgattcgctttgcacggtttccgcgctggttacagcgttttatgcgtggtgccgatatgagtggggtttataaagcatggcagaagctagccaatgattcgttaccgcaaacaaaggcggattatttacacgactttaatcatgttcgtaagcgctggatctttaaaggatatccgctacaacgcgcttatttatggtgtagtggggctgtgactcagattcttaattctgactttattcgtagtattcttgaaagattttaaaaagcgcgtttgcacgcgcttagtggggagaactagtatttaggccaaccattagcatcccagttaagagtactaatgagaagctttggtctgccattatcactggcatcataggcatgacgaacaatcacatcggtatttagaatatcttgcccacctgggcctacccattgattattacctgcatcaagaatgctaccgccaccagataacatattattgccatttttatctaggtaagggccgcgaatatcggtagagcgaccgtatgcaatgcggtaggtgctgttagtgccttcacaacacttacccattgatacaaataagtagtagtaaccttggcgatagataatcgtgggcgcttcaataccacctgaacgacttgccaatgagtaaatttgaccaaatggtttcatcgttattgggttgatacgtgttagtttaatacccgagttccatgagccaaatgttagccaaggtgcaccatcttttgccaccacaagatcggggtcaatagcgttgtaattattgctattggtggtgttgatcactaaaccatcatcacgccaatcgcctgcagcaacactactggctgatgctaaaccgatagcactgactcgggaaccaaaggtcgaaatggcataatagagccagctacgattattgtagcgttttaattcaggcgcccagacatcaattccatcatgatcaggcacatagttctcccaccaagcaagtccatttggaaaaacaggtaaagcatcattccagtccacaccatcacttgagtatttaccataaattcctgggccagtttgaaaaatccaccaggtgccattttcatagccaatagtcggatcatgggtgactaaactaccagtcagtggccagtgttctgctgcgccattggttgttgatggatcaaaaggggttgattcaacattggcaagtttggttagctgccattgctgcgcatcgctgccgttgtagctccactggctaatatttgcgccatcgttgccattaaattcatataagtcgagcgctttaccactgtgatcattgataaagctgtaatagccgcttccttcatcatttatttgccagtgttggctggcgagatttgcatattcgtactgtacaacattgccaccatcggctgttgaccactcatacacttcaagggccttaccgctgttcaggttaataactgaataattattaccaccaatattggtaattaaccagcgctgggtgtcgtggttagtgtcagcccactgactaacatttgcaccatcattggtttgcgcgctttctacttcaacaaacttagcactgtactttgatttaattgtatatacgccattatcaagcgcataagcactgggaagtatcagtattgttgcaaagctaaacgcagcgagcgctttttttgaaagtatcatagtgtctccaaatcattgttattgagctttccttgtgtgttctgttccttggattagttttgatctacagctaacaacccaattaagagcattggtgtaaatgcaaactatttataatactttattatattattatttttgtaaagtttttcggtaataaaattaacaaaaattttacctttaactatttaggaagggacttgagtgtttagctgagatacaaaaaagccacttagtgagtggcttttcggatgttattgagtaataaactgagtgggaatatcccatttgagggtatgcagttggccttgccaagtttggatggtgatccacagtttatcatctgctgagatagttttaggggctatcgcgtgggcatgctgaccgtgattggtgccatgcattatgccttcttcatcttttgcaaactctgccagcggcaaaggtgactgaccaatatttaaatacgcctgacgaatattgcttatgtcaccttgattaaaagcaataaagaagtctttaacgtattcgttgtggtgtgagtaaggagcatcttcatttagcggcattggagcgattttaaattcgcctgcttgttgctcttgccaaagtgcaggaaactgagggttcaatgattgataaataaaccaaacaggtaaagccagtactacagcatgcaaaatatactttttacgttgccaccaagttgcttgtaaacgagccattaatttgcctcctgaacgttatttactggcgcagcttggcgcgcttttacaggtttgttatttactaattttgcggcatacatcataaagcccgtgattgacataccagttaaaatcaaaccaaagataaaccaaataacttttgtccacagaccgccaatattaccataatgcagtggatcagcgatatgcgagagggtaagaattcccgacatggtttctgggcttttacttgctgcgatttcgccagtccaaggattgattgacgttgagtaggcgtagttatcgtagaaaatagtatcgccactgcccatgatattaaacatgccacggttatgctctggtagcatcacatagctaggtttgaaatctgggtatttttctttggtaagtgccaatgccgcttttaaatcggtaggcggtgtttgtttatccgcaggtaaagttgacacagccactagcggtgcatgctcttctatgtctatttcgttatgccacatgatggcttgaactaaataccacaagcccgtgagtgccattactgccataaaccaaattgaccaaacgccacttaaggtatgtaaatcttttagaaaggtttttttgccttggttaaaacgcagttttggctggctaaaggcacgccaaaagtttttataaatcactaaaccagttactagtgcgcctaaaatgacaaaagccatggcgctgacgaggtagtacccaacgctgtagccttcttgccaagggaagaacagccagccgtgcagggtacgcataaactcgataaacgatattgttgtattaactgcttgtacttcacctgtgtattgattgacgtaagccacagcataaggtttgtcggtatcagtgaaaataaccgcattaaccaagtaaggctcataagtaagcacactcattacatcggcagtcggataggctttttcaacgctattaataacttcatcaacccccaatgccggtaagtcgttaggattgtttgcacgtgcctcactattggtgagccaagtgagctcatggcttatcacagacacagtgcctgtgacacaaataaagcaaaatagcacccatacaggaagcgaaaaccaaccatgcagttggaaccaaagacgtttactcatggtaaaaatagctcgacgttaattgatgatagtaattgttatcattcaaattgtactacagtcttttaagtaaacacaatgtctgtcgacgagctgtaaaaaaggcgctattaagcgccttcttcattattttgattgagggtaacaattcgttgcgggaatggtatttcgatattcgccccttgaattgctttaaatacattgcggttgaccgctaatttagtctcaataattttggtggttggcacccaataacgataactcaaggtaacaccgctgtcggcaaagcgctcaataccgacttgtgcatgaggagcatcactaactagttcatgctcgtctaacactttttcaataagctcaatagcgagatcagcattggcatcataggcgatgtctatttcacctttaactaatgaatagctaaacgagttatgtaaaatctcaccaacaatatgtttgttaggaatggtgatttcgactttttcttcgtttattagaattgtgtgaccaagctcaatggttttaacttgcccactgacaccttttacttcgatagtatcacccacaacaaaaggccttgttgcaatgatagcaaggcccgcaccgtagtttgacagcatgccttgtagcgccaaacctgcacctaatgatgcggcaccaattgctgcgacaaaaggggttacgctaatgccaattttgccaagggcaataaccaagaacatgatgatcagtaatactttgatgacattactgacaaagttagtcagcgtgatatcgatattgtgacgttgcattagacctgcaaccatattcgacactttttgcgctatccataagccaatgaagagaattaatatggcacctaaaatttgcatgctgtaggtgaccaaatattccatgatcagattgtagtatttctcgacttgttgtatttcagactcaatcatatgttttcctaacaaggttactgctaatactgactataccagaacatattgcataacaggatagagtagcggcactattatagcgctcagtaatgcacttaatgccattgccactgaggcaaatgcccccgctttaggttgctctacaattaatgaggcagtgcctattgcatgacaagctgtgccgattgcgacaccttttgcttgcgcattgcggatatttatcagcgagaaaatcaaattaccaaatatggctcccagcacaccaatgaatatcaccatagctgctgccaaagagggaataccaccaagagcatctgtaacaagtaacgttattggcgtagtgaccgatagactagcgagtgaggcgcttagctgtgcaggcgcatcgaataaataacaaataaatgaagcaaccactgttgcattgatcacacctaagctacaactaattagaatcaacaacaggttttttttgacatgtataaattgctgataaagcggtaatgctaaagctacgatagcaggctctaaaaaccaacttaaaactttactgtgcttggcaaaaggctcatatgggagttttagtgccactaacagtgcagaaactaacacgattgcccagcacactgggttagttaaagctttgctgattgcatgttgcgttttagcgtttaaaaaacgtaaaaccaagaaaaggcaaacagttaaaggaatgctcaaccaccataaactaactgtcattttcgcgtcccttaaagtaggcgaatagtgagcctattagaataatgctcgtcaggggaacaataataaatacggcaagaaggagtaaccagtgttcgttaataactcctaaatgctcaataataccgacgcctgcaggaataaaaaacagcggcataaagttcagtaatgggctcgctgagggttttaaatcttgctctttaactaagcctgttaaaagaagaatgagtaataaaaccatgccaagtaatggtgcagggaatgtgcttgcaaacaaagccgttaaatatttagcaatggctaaacaaacaaggatgatggcactactgataaggtatttcatgattgtgaataattgcgaataaagtacaactacatcatacccttgtcagttgtactatgcgactttagcttaccatgatttggcattattatactggatatcctctgcaccttttgcctttgcaatcgcctttttggtattaggattcattagtaagcgaatttgactccaggtttctttagcgaggattttacgctgctgtgagcggtagctttgctgagtaattcgcttaattgcagcaagcgtatctggcgagcgggccattaaggtttcaaggacagcatcggtttgtttatcgacatcatcagtcagttgcgtaaccaagccatattctttagcgtcttcagctgatataggctctgcatgacttgctaaccaaagtgcttggtcgcgcttcattaagcctgcaagtactacgtttgcccccatatcaggacacaggccccaacgcgcttccataatcgctaatttagcgtttttatcgacgatgcggtaatcagcaccgagtgcgatttgcataccgccaccaaagcaatgtccggtcacttttgcaatcaccggaatacttaagtcttgccaccctaacaccactttttgcgctaagttttggtttcctggtaaccacttgaataacagcttgatgatattactcggctttttcatcaccgcagcaacatcaagaccagagcaaaaatggtcgccttcgccagagataaccacagcgcgtaaactgcgatcgcgtttaatttttttgattacgtttgcaagttcgacaaacatggcaaaactgagtgcattttgtttctcgggacgagcaaggcttacccatgcgacctgttgttttatttctagttttatcatggtaactcctctgacctgtttgttagagcttacgagctaattacaactaagtaaagaattgctgatgtgtcgcaaggaatcattatattttccaaaaatgggtaaccttgtcatatatttagttacaaattggtgtatatttttaaaacaaagatgctagttcatagctagtttgattttgtgattagttagatactttcgcaaaatcccatgacacgactagacttagctttaagtcgcgctacaaggagtatatatatgctgatgcgcaaaacagctcgcataactaaacaatcatctcgttctttggcttttgctgcaatttctgtagcattaacaaccacattgcttggctgttcagatgataaagcaaaacaacaagctacgccgcctccggctgtttctgtgtttaatgtctctacaaaagaaatcggcaactatcgtgaatttgtagcacgaaccgaagcgtttcaagaagtaaaaattagagctcgtgtagaaggtgagttaatagaacgacacttcgatgaaggatctactgttgagaaagaccagttactgctgcgtattgacccgtctgaataccgctcgacagtggctaaagtaaaagccgatctaaaaagtaaaattgcagcagcgagttcagctgaacgcgatttaaagcgcggccgagaagtcgcctctgatgggtttatctctcagtctgatctagataaattaaccactaatttcgaacaagcaacagcagcagttaaggcaactgaagctgaacttgaaaaagcagaattaaatttaagctacaccgaaatacatgctccatttacagggcgcattggtaaagtaaattacgatgtagggaatattgttggcccatcatcaaatgagcttgctgaattgacagatgttgaccctatctatgttagttttcaggtggaagagggggactacattagttatcgtcaagagcatcaaactagtgagagcaacccgcaagatgtacccatcgatttaactcttaaacttcctaacaattcaacattcccaaataaaggtgtgcttgattttgcagatacaaaaattaatcaaaacaccggcactgtagagctaagagctgcgttcgataatcctgaggggatcgtgatgccaggattatttgtaaccttaattgttgaaagcacaaataaaaaagaattagcgctgatcccacaagtcgctgtgcaggaaaatcaacaagggaaatttgtacttgttgttgatgatcaaaataaagttgctatgcgcattgttcaattaggtcgacgcattaatgctatgtgggttgttgagtcaggcttagaggctggtgaaaaagtcattattgaaggtttacaaaaagtgcgtcaaggcgctgaggttaaaccggtagaaaagcaagtcgatccgacaacgggcaccatcactagcaaagctaactcttaggagtgggatatgatcagtaaaacatttatatctcgtcctaagtttgccttggtaatatcgattgtaattaccatcgcgggcttgatttcaatgtcattattgccagtgaatatgtacccgcaaataacaccaccacaagtgcagatatctgccagctacccaggcgcaagtgcgcagatcgttgaagagtctgttgtgcgacccattgaagagcaagtcaatggggttgaagatatgatgtacatagaatccacctcatcgaacaatggcaccgcgaatattacggtgtactttaaggtcggtacagatactgatattgctcaagttaatgtccaaaaccgagttgcactggcggagtcaggtttacctgaggaagtgaagcgccaaggtgtatcggttaagaaaaagtctagttcaatgttgctcggtattaacctttactctgataaggaaaatattgacgcaatcttcttgagcaattacgcaactaactacttaactgaaccgttagggcgtattaacggggttgcttctgctgaggtaatgggggagcaaacctattcaatgcgcttgtggttacgcccagatcgtatggcttcgcttggtttaactgtggctgaagtgcgggctgcattgcaagaacaaaatactattgtagccgcaggtaaattaggtgctgcgccatcggctcctagtcagcaatttgaatactcgattcaagcaagagggcgcttaaaaaccccagaagagtttggtcaaaccataattcgctcaaataaagacggtaactttgtgcgcttgaacgatattgcgcgcattgaactgggggcggcaagttatagcaccaccgcaaaattaaaccagcaagacaccgcgtttattgtaatttaccaattgactgaagcgaatgcgacgcaagtagctaacgatgttaaagcacgaatggaagagcttgcaaaacaactgcccgatggtgtgaagtattctattccttatgacaccacagaatttattaaccgttcaatcgaagaagtggtggttactctggttcaagccgttggcttggttattttagtggtttttttattcttacaaaactggcgcgcaacgcttattccaacggtcgctattccagtatctttagtgggcacttttgcttttatgatgatgatgggttattccattaacctgatcactttatttggcttggtactcgcaataggtattgttgttgatgatgccatcattgttatagaaaacgttgaacggatactaaaagaagaaaagctaccaataaaagaagcggtcacaaaggcgatggagcaagtatcagggccgatagtggcaacgaccttagtgctgcttgcggtgtttgtgcctgttggttttatgccagggataacgggggagctttataagcaattttctgtcacgatttcgtttgcagtgcttatttcctccgttaatgcattaaccttgagtcctgcattatgtgcattactgcttaatgaaaaagccatgaagccaattaaatggttagcaccatttgaaaacatcattacgcgctcaaccaatggttacagtaaagttattaactttatcctaaaacgtacagcaagaatggcactgtttgccgtggttatttttgcagctgctgggtggttggtgaaaaccgttcctacgggctttgtaccagcagaggatcaaggcttcttgtttgtagatgtgcaacttccagatgctgcagcaagtggccgtacccaagatgtgatgcacaagttgggcgatattgtgaaaaatgaaccagctgcaaccgattttattgcggtgtctggtttttcattacttggtggtgcaggctcaaacaacgctttgggtatcgtggtactcaaagattgggaagagagaacgagtccggagcttggcttacgttcggttttaacccgcttgatggggcagttctgggcaatgccagatgcgcaaatcatggcatttaaccctccttcaatacccgggcttggcactagtgcaggctttgagtttagattacaagacagtgaagggcgtgagccagcagagcttgctcaagtgttaaatggccttgtttatgaagcaaaccagcgaccagaactttctaatgtatacagtacctttagggctaatgtgccacagtacttattagaagtagaccgtaataaggcgaaagcacaaggggtcgcattgagtgatattttcttgacgctacaagcgcaattaggctcattatatattaatgactttaatcaatttagccgtacttaccgagtgatcatgcaggcagaaagccaatttagacagaacccaacagacttgcagtattactacgtacgaaatgatgaaggtgcaatggtgccgctcacaacactcgctaaacttgagccaattcttggccctacaagtttaacgcactttaacttatatcgtagtgcaagcattagcggacaaccagcggcgggttatgcaagtggtgatgctattaaagtaatgcaagagttggctgaacaattgccaacgggctatgtatacgaatgggcaggccaatcgaagcaagaaattgaagccggtaacatggctccgattttgttcggcttagcagtggtatttgtttacttattcttagtagcgcaatacgaaagttggacaattcctttctcggttattgctgcggtaccgctggcgctatttggtgccatgcttgcgctgtacgtaattggtatggaaaacaacatttatgcacaggtggggttagtgctgctaattggtctttcaaccaaaactgccatcttgattgttgaatttgctatggaagagcgggctgcaggaaaaactatatttgaagcggcattaaatgcagccaagttacgttttagagctgtactgatgacggcattatcgtttgtgcttggtgtactaccgctggtatttgccagtggggcaggggcaggaagccgaatttcacttggtatcacagtgttgtttggtatgcttgccgccacaatttttggtactttattagtgccgctattttatactttagtgcaatctatgcgcgaaaaaatcaagggtgagtcagctcacgattaataattgataaaaaataacaaaaaagtcagggtaacctggctttttttttggcaaaaaagaaaataggtttgttatcatattccgattaacgcaatccgaatgcgcagagggtttgaacaatggcaggtccacgtttatatagtgaagaagaagtaacgcatcaggcatatgatatctttttagagttagcacctgataatttgaacgagcaggatattgctgactttaatgaacacagagaagagttgggttttattgaagaaggtgagcctgatgagcagtggcaagaatttgttgcactagaaattgaacctgagctctttgtacaagtcttagttggacttgaatttgaaaaccaagatattttattcgccaagattttaattagccgagataaagatgctccgttttgccacatactttggaaagatagcgaataacgcgccagctgatgtttgactctacttttaattgttttaataccctaaaacgaattatcttagccgccatgctcgttagtagttggcaggcttttgctgttgatccgtttgaagactttcatgaatacgggcaattatcagaagaagagatccataaaattcataaaggcgagttgctttatggtgatattgagtttggctttatggtaagtcgtggtaatacagattcaaccagcttcaaacttaaaggtaacctttatcaagactttgaaaagtggcgtaatcaatttaagctcgacaccctgtataagcgcgatcgtaacgatgaaacaggaactgaagaagtgtctgcggatcgtatctttgtatctgggcaaggcaactacaagctgaatgtcaaaaacgaatcattctttatttatagtgattacgaacgagataaatttagtggtctagagtttaaaagcaccgttgcgacaggatacggaaatcgtatttatcaaggtagtaaaaataaggtggatattgacgtaggacccggtttgtatcgctcagtggcagatcaagagacagccacagaagaagatgaaacaaaaacaggttacttacttcgaatggcattgcagtgggagcgtacggtctctgctcgcactcgctttaatcaagacgtcagttatgaacaatcgttgtcgggattaaactcgcgtttaaaatcagaaacctcattgatcagcaaaattatgggtgatgtatcactcaaatttacttatatgtatcgctataactcaaaaccggaagaagaaaagctcaagtacgattctgagctgagtgcgacctttgtttatagcttttaagagaatatctcagtatgtatcaacataagcagtacgctatttttatttttgttattttaggctggattggcggctttattgccttagcatggaatttaattggtgcagatattccactcatggtgtttagtgctatcttagtgctggtggcctttttgtttcatggtttaaccattaaggtgagtgataaaaacgtaagctgggcattcggtccgggtgtatttggtaaaatagttacctttgatgagattgaatctgttcgggcagtaagcaactcatttcgacatggcataggcctgcgtattacacatgatgggtgggtttacagtgtctctggattcagtgcagtagagcttgctatgaaagacggtacaaagtatcgcttagggaccaatgaccaagaaggtttacttgctgcgcttaaagagcatattgctgaaccagagccagcactggatgcacagaaagtagctgaataagcacacagcagatataaaaaaagcgccaatggcgctttttttatagtcatggtttagtggctgtgaccacaaccaccttcaccgtgcacatgaccatgtgccaactcttcttctgttgcatcgcgtacttcaagtacttcaacatcaaaatgtagagtgatgcctgaaagagggtggttaccatctacaatcacatcttcatcttggatttcgatgatcattactgattgatcaccggcatcagttgtcgcacgaaactgcataccaacttcgatttccattccttcgaacatcgacttaggcacagcttgcatcaagtcatcatgacgttcaccatagccttgctctggttctacagttacgctaaatgtgtcaccagcttctttacctagtagcgcatcctctaggcctggaattaggtagccagtgcccacgataaacaccagtggttcaccatcgaaagagttgtcgatagtgtttttgttattatccaatactgaataatgcatttttaccactttgtttgctgctacgatcatagtctttcctatttattcatcttcgagagagtaaggcagagcttgaattgatagctcaacctgagggaggtgtttagcacgcaacacttggcctgcctcattgtcgtttggcagcacaacaaggcccattaatgtttgcgtatcttgattataactttggctaattagcttgcctgcacgacgccaattctcgcccatcttggtttcgagctcaagctcatcaagttgaccttcggctgtgcctgcaacgatatacatagcgcgtttatttttgcccagatatttcatgcgagcgactgtttcttggcctgtataacaaccttttctaaagctgataccacctagtgcttgtaggttcaccatttgtggtacgtactcgccaatggcgtcgctatttaaagatggctcaccagctgcaattgcagcttgttgccaacgtgcatcatcatcaagggccgtgacttcgtctggtaaacaaaagtcgttattgaccatcagtagaacacggttatcagcaagttttaatgctttaccgccagcaaagtcaacggcactgtgttcctcatcaaactcaatgttgagtgatttaagtgtattattaaggtcatcaccaattaggccaataagcgctttttcactttgctgaatgtctacttgggaaaataccgcatatttttttaactctaccagtgactgctcaacttcaggttttgtgcccacaaggtagtagctatcttgatgctcaaaaagtctaaacacaccccaaagtttgcctttggcattacagtgtccagcccataaaaagttatctttgttgagcttattgatatcttgtgtaatttgtccgtgaaggtaagacagcttatctttgccagttaggctgataagcgaataagataaaggacatgcgtaaacagtcgacataaaaaccttctttacgatatgaatgagaggtaatgataacttagttagggtagcaatttaaatagctgtttattcgatggcaatttgttaaactgcagacaaataagtacgaggtttaaaatgactgaaattcacagtaaagaacgtattcgttgggcatgccgtcgcggtatgttggaacttgatgttttattcatgccattcgttgaagaagcgtttgactcacttagcaaagagcagcaagctgtatttcaacgcttacttgagagcgatgatcctgatttgttcgcatggttcatggggcatgaagagtgtaaagatccagaactaaacactatggtctcgttaattttagaccgagttcgtgtataggtttgtcgttaaaaataataaattagaccacaaaccatttgtggtctttttttgttttcttgctatcacgttctttcttaccgcccactccttgattacacaaatatttgctatttcatctagcctgattgcaggaattattagttttaaaaaagcaaaacaagcacatcctgaaaacggcacagttattttagaatactcacagttaagatttgtgagtgacaacattcaattgcaaggcgagataagtccgaaaagttatatctttgcaaactacgtagtgctcaggcttgaggggttttatcagtcacactggctgattatttcagcagccagtgtagaagacgtttatttttcgcgtttgaaacgtgctgttattgcagtgcagcaaccgacttaggggtcagtattgttggtgttggattgtcgttttgctctgggtaatcaatagtgtagtgtaaaccacggctttctttacgctcaagggcactgcgaattatcagctcagctacttgcacgagatttctaagctctaataagttattagacactctgaagttagcgtagtagtcgtgaatttcttgttgtagtaactccacacggtgaagggcacgctctaagcgtttagttgagcgtacaatccccacgtaatcccacataaataatcttagttcatgccagttatgagtgatgacgatttcttcatctgaattagtgacgcggctttcatcccatagtgggagggcttcaagggctgggcttgcatcgattttacttaagatgtctttcgctgcggcatgggcaaacacaatacactcaagtaacgagttactcgccatgcgattagcaccatgtaagcctgtgtaagcgacttcgccaacagcataaaggttgtctaaatctgtgcggccattaaagtcagtcatcaccccaccacaggtatagtgtgcagccggaaccactggaatggcttctttagtaatatctaagcccacacttaaacattttgcatagatggtagggaagtgctcaatgataaagtctttgtctttgtggctaatatcaagatagacacagttcgcaccaaggcgcttcatttcaaaatcgatagcacgagccacgatatcgcgaggagcaagctcttcacgctcatcaaaatctttcataaaacgggtgccatcggggcgttttaaatatgcaccttcaccacgcattgcttcggtaatcaaaaagttttgtagctctgggtgatataaactagttgggtggaattggttaaattccatattggcaacccgacaccccgcacgccatgccatggcaataccatcgccacttgatacatcagggttagaagtatatagataaactttgctggctccaccagtggcaagtgcaacgaatttggctgaaattgtttcgacttttttctcttcacagttccatacatataaaccatgaatatgtttgccctttttacctagactcttatcactgattaaatcaatcgcattatagttttctagcaaggtaatgttttgatgggcttgtacttggctaattaaagttgtttgcactgcgcgaccagtggcatctgcagcgtgtaaaatacggcgatgactgtggccaccctcacgggttaaatgaaagcgctctttaccttttgagtcaaactccatatcaaaaggcacaccttgttcgattagccatttcaaacacgtcttagcattgcttgcagtgtaatgcaccgcatctcggtcacataaaccaccacccgcatcgagtgtatcttcaacatgagattcaatgctgtcattctttttatcaaataccgcggcaatgccaccttgtgcatataaggttgacccttcagtcagtgcacctttacttagtacagtgaccttgcaatggttagcaagagataaagcaagagaaaggccagcggcgccgctgccaatgatagcgacatcagtaatgtgatgtttattttggttcatgtctgtggtctttgcggttacaatgctcggctagtagtgccaaaagtttgagcaaatatttttttatgtggtatacgtatatgtaccatatttgcagtaacactattagtcattttaatatgttataccaatcttattaggttttaggtcacataaacagtctactttaggctgtttgtttaaatttattaaattcacagtgaacttatgtacccgttgatttaacagcagtatttgaacttattgtgtaataagatcggtatgactcaatttatttgcatgctattttataaaaaaatcattttaaactgaacttttatattcatgctgcagtcagagtttgtgtaaacaatggcgagtatatgaatagcaagcaagaatcaaacagaggagtaccggctcgaatgagcgagcaggatttggatttagcgttagttaaaagggtccagcaaggagataaaaacgccttcaacctattagttagaaaatatcagaacaaaattgcgggtttgatttcacgttatgtgtcgaaccaaggtgatgtcgctgatgtcgcgcaagaggcgtttattaaagcgtatcgagctctacctaactttagaggtgatagcgccttttatacttggttataccgtatcgccgtaaattgtgctaaaaattacttggttgcgcagggccgaaagccccccgcaaacgatgttgatgctgaagaagccgaattttatgacagtgcagatgctatgcgttctaacgcatcacctgaaaacctgttattaagtgacgaagtacgtgctgtaatttttaatacgattgatagtttgcctgaagatctgaagaccgcgataacccttcgtgaaattgaagggatgagctatgaagaaatagccgtggttatggattgccctgtgggaacggtacgctcgcgtatatttcgtgcccgtgaggcgattgataataaattgaatccattaataggtgagtcttagtatgacaaaagcagacgttaacaagttggataatgagcagttgtccgcgttacttgacggcgagcagcagttaactgatcaagcgatcactaacgacgatgtagcaacatttggtcgttacgcgatgatcggtgacgtaatgcgtgctgaggcaaataataacgcttttaatttcgacattgcagacgcagtggcagaatcacttgagcaagaacctgtttacgctgatttcgcgaataaaacaacagcaccaaaaagcgaagaaatcgtggcggcaacaggcacagataacgttgtagcatttaattggcgtcgtccatttgcccaagtggcaattgctgcaagtgttgctatgtttgcgattgtgggcgtacaaacattgccgcagaacaccgaatcaccagaaagtgacattccacttttacaaacaacacctttaacgggggttgcgtcacctgttagctattcatcagaacagcctgcacttgaaaacgcagagcaaggtttacgtgaattacaacagcagcgtataggggcattagttcttgagcatcagcgtcaagcacgtgttgcctattctctggaaagttcacaaactgcagaaaacgcagaagaggaaaaaaactaattaaatgaaagtgtttacttttattttgtcactggcattaatggctccggcttttgccagtgatgaaaaccccgccaaagcattattacttaatatggctgatgccgttcatacccgcaactttgatgcatcttttgtcgttgttaaaggccaaaccatggaaccttatcgttggttgcatgctaaacaaggtgatatcgagcttgaacatttgagcttgcttaatggtgcagggcttgagatggcaagagttaacggacaagttacttattttgagcctcactcacagccttatactatcaaaaccgacactattgccgggcctattcctgaagtactttttaaagatattgaacgcgtaagtgcacattatgattttgtgctaggtggtaaaggacgtattgcaggtcgctcagcgcagttagtgcgtattgaatcaaaagatgagcataaatttaactactggatttggattgataccgaatcatcgcttctacttaagtctgcttatgttgatcataaaggcgaaatgttggagcaattacagttaactcacataagtgtgaccgagcagccagcgccaatgctacttgaaatgcaaaaccgtagttttcctgctgctatgccaaccactgagattgaaaatgcatctgaaggtgctggcaataattggaatattggctggttgccagatggattcaaattgttaaagtcagatcgccacaaattagacttaaataatgaactaacagactattacttatactctgatggttttgtggaagtatctgtgtttattcaaagacctttaccaggcaaacgagccagtggtgcactatcatcgggtgcaacgacggtttatgttcacaatggcggtggctttgatgtatcggttgttggtaatattcccgctatgacagccaaagctatagctgagtcggtagcgcgacctctttaaattatgattgaacaaacactcactgtcgtgtcggttaaaggcacgacagcgaacttagaagcagagcaaaaacaggcctgtgccggctgtaatggtcgatgtggctcgcaagtattcgctaaactgtttggaacagccaaaaaaactttcccctatacctttgattctgagttaaaagtcggtcaaaaagtgaccttagcacttgatgatagtcatttagttaaacatgcgatggctgtgtatatgttgccacttttactcagtttgggatttgctttaatcgcttttgccgctttttcattacctgagggctggcaaattttagcagccgtgattggtggcttaacgggctatgcaatagcaaaatcaagggttaagagcctcaagcacgatataaaagtaataaaaattcacccaattactattcctttcactcaaatagatggtgattaaagccaattaaatgtaaaattgtcgctttatacacttagtccatttatatagaagtttagaatccagtttatgaagcatatccgtaatttttcgatcatcgcccatattgaccatggtaaatcgactctctcagaccgtcttatccaagtttgtggtggtttaacagaccgtgaaatgcagcagcaggtgttagactcaatggacattgagcgtgagcgtggtattaccatcaaagcgcaaagtgtaacactaaattataaagctaaagacggcgaaacataccagttaaacttcatcgataccccaggacacgttgactttacatacgaagtatcgcgttcacttgcagcctgtgaaggtgcattattggttgtagatgcgggccaaggtgttgaagcacaaacattggcaaactgctacacagcaatcgaaatggacttagaagttattccagttctaaataaaatcgacttaccgcaagccgaccctcttcgtgtagctgaagaaattgaagatattatcggtatcgatgctctagatgcagtgcaatgtagtgctaaaacaggtattggtattgaagaagtattagaagttattgttaaagatattccgccaccggtaggtgacaaagataagccactacaagcgcttatcattgactcatggtttgacccatatcaaggcgttgtatcattagtacgtatcaaacacggtgaattacgctctggcgataaaattaagatcatgtcgaatgagcaagttcatatcgcagataaagtgggtattttcactccaaaacaaaccaacacgggtatcttaaaaactggtgaagtaggttttgttattgcgggtattaaagaaatccacggtgcaccagttggtgatactattacgcttcaacgtaattctgcccctgagcgtttacctggcttccaacgcattaaaccgcaggtttatgctggtatgttcccaatctcatcagatgattatgaatcattccgtgatgcgcttgataaactaagcttgaacgatgcgtcgttattcttcgaaccagaaaactcaacagcacttggttttggtttccgttgtggtttcttaggtatgctacacatggaaatcattcaagaacgtcttgagcgagagtacgacattgatcttattactactgcgccaacagtaatctacgaagtagaaacaaaagacggaactaaacaaatagataacccgtctgacctaccaccggtaaacaatattattgaaatccgtgagccaattgttgaagctaacatcttagttccgcaagagtttttaggtaacgtaattacactttgtgttgaaaagcgtggtatgcaaactaaaatgagctaccatggtaagcaagttgcggtgacgtacgaattaccgatggctgaagtagtaatggacttctttgataagttaaaatcaacaagtcgtggttttgcatcacttgattataactttaagcatttccaagcttcagacatggtgcgtgttgatgtactaattaatggtgagcgtgttgatgcacttgctattattgtgcaccgtgatatcgcgcagtcacgtggtcgccagttagcggaagcgctaaaagatctgatcccacgtcagcagtttgatattgcgattcaagcagcgattggtcagcatgtgattgcacgtacaacagttaagcaattacgcaaaaacgtaattgcaaaatgttacggtggtgacgtgagccgtaagaaaaagctactacagaagcaaaaagaaggtaaaaagcgaatgaagcaattaggtaacgttgaagttcctcaagatgcattcttagctatccttaaagttggtaaataataagaagtagatataggaattaatgcatggcgggttatttttcaattttcttagtgttgttaacacttggctcaggtttaatttggttaattgaccactttatgtttgcgccgaagcgtcaacagcgaattgcccttgctcaaaatgccgcaggtggtgatttagatgaagaaaccgctgcattaattgctcctgagccaagtattactgaaacggctaaatcaatttttccgatgattgcggcaatcaccatcttccgctcatttatttttgaaccgtttcaaattccatcgggttcgatgatgccaactttacttgtgggtgactttattcttgttcaaaagtactcatatggcattaaagacccagtttggcgcagtcagctagttgatgtaaacgagccagagcgtggtgatattgttgtatttaaatacccacttgatgagcgtgttgattacattaaacgagcaataggtctacctggcgataagattgtttatcgcaacaagcacctttatattcagccaaaatgtgaagaaggtgctacgcaacagggtgagttgctgtgtaatgaatacaataaaattgatatggaaatcctcaacagtgacgagttcaagcagggttcaatgaatttggtgcgtttagaagaaggtctaagcacagtcaatcataatatcttgattaacccgcaagcgcctgaaatgaaaggccgttattatcagcagccgggtactcgctcagatgagtgggtggttcctgccgatcattattttatgatgggtgataaccgtgataatagccaagacagtcgcttttggggctttgtaccaaaagaaaacttggttggtaaagccgtctttatatggatgagttttgaatttgaaaatggcccagatgactttttaccaagctgggttccaactggtgttcgttttgaacgcctaggtaatattcagtaacgatgaaaaaaaacgtaacagagttatacaataaaataggttatacatttactgatcaagcgttgcttgagcaggcaatgacgcatcgcagtcataaaggtcaacataatgaacgcttagagtttttgggcgattcaattttgagttttgtgattgctaatgcgctttataataaatttccaaaagcacgtgaaggtgatttaagccgtatgcgctctactttagtgcgtggacaaaccttggctgaatttggcctagaatttggcttgggcgattacttacgcttgggcccaggtgaattgaaaagtggcggttttcgccgcgaatcaacccttgccgatgctgttgaagcgattattggcgcggtattcttagactcaaacattgaacaatgtggagagcttattttaagctggtatgagtctcgccttgatgcaatttcgccaggtttgaaccaaaaagacccgaaaacattacttcaagaatacttacaagcgcgcaaactatcgttaccaggctacactgttattgatacaaagggccaagcgcacaatcaaacattcacggttgaatgtattgttgaagggatggatagcattatctcagtgggtagctcgcgtcgtaaagcagagcaaaaagccgctgaaaaagccttaaagatacttaaaaatgaatcttgatgatttaatctctaaatcacctgcagagctagatacacactgcgggatgattgccattgtaggccgtccaaatgtgggcaaatcgaccttacttaactacattgttgagcaaaaggtgtcgattacttcgcgcaaaccgcaaactacacgtcaccgtattatgggtattcataccgaaggtaaataccaagctgtgtacgtcgacactccgggtttacacgtagaagaaaagcgtgccattaaccgtttaatgaacagagcagcatcaagttcaattggtgatgtagaactgatcatttttgtggttgaaggaacacactggaacgaagacgatgagatggtacttaacaaagtacgccaaagtggtcgtccggtgttattggtaatgaataaaatcgaccaagtaaaagatcgcgatcttgtgctgccacacatgcagttcttgggcgaaaagtttgactttgttggtattattcctgtttctgctaagcagggtaaaaatattgaactaatcaaagctgaagtaaccaagcgtcttcctctttgcgagttttatttccctgaggactacgtgacagatcgctctatgcgattcatgtcggcagaagttatccgtgaaaagctgatgcgttttatgggtgatgagttaccttattctgtcacggtagaaatagaacagtttaaatggctcgataatggtgtttggcaaatcaatggccttatcttggttgagcgcgaaacacaaaaacgtatggtgatcggtaacaagggcgaaaagctaaaagttatcggtcgtgaagcgcgtaaagaccttgaagaaatgcttgataacaaagtgtttttagaactgtgggtaaaagtcaaatctggttgggctgacgatgaacgtgcgctacgtagccttggctatggtgaagactaagtaaagcttacacgccatggatagcgaattctacacagcatacttgctgcatcgacgtccttttagtgactcgcaagttatgcttgatatgctggtagaaggcgttggtcaactgagaatgttggctcgtattagtggtcgccaggccactaaacataaagctcaactgcaacctttccaatctctgcttgtacaatacagcggtaagtctgatttaaaatacatcactcgttttgagccccacggcgggcaaagtatgttaactggcacccagttatattgtggtttttatttgaacgaattaaccaatcgtatcgtaccaatcaacgagccgatggaaagtgtttatcatctttataaacagcatttacacgagttgtcgaccactaaaagcctgcaagcggtgctgcgctcatatgagtttcaactgcttgagatgctaggttacggtgttgattttagcgttgatgcgcaaggggatgaaataaacgatgcagcaaattatcagtactttgctgaatacggttttttgttgcatgacgacccccatagtggcttttcaggaaagcaattaaatgccatagcggctcatgactttagcgcccctgatgtgttatatatggctaagcaattaagtcgatacctactcaagcctttacttggtaaaaagccattaaaaagccgtgagttatttattaagtaggctgatactcagccttgaatcgttgttttaaacaggtaaaaaaatgaaagatattcttcttggtgtaaacgttgatcacattgccactttacgccaagcgcgtggcacgagttacccagatcctgcgcatgccgctgctgttgcagagcatgctggtgcagatggtatcaccattcatttgcgtgaagaccgtcgtcatattcaagatcgtgacgtatatgtgatggcaaaaacgattcaaacacgaatgaatcttgagattgcagtcaccgatgaaatgatcaacatcgcccttgaagtgaaacctgcttatgtgtgtttagtgcctgaaaaacgtgaagaactcaccacagaaggtggccttgatgttgtaggtaactttgaaaaagtaaaagctgcaacagaaaagctgacagcagcagggattaaggtttcgttatttattgatgccgacaacgcgcaacttgatgctgcaaaagcgtgtaatgctccttacgttgaaattcacacaggtgcttatgccgatgcagagaatgacgaagagcttcacactgagcttgaacgtattcgtagcggcgtacaatatgctgatagcctaggtttaatcgttaatgccggccatggtcttcattatcacaatgtaaaaccaattgcggcaatgccagaaatctatgagttaaacattggtcatgcaattattgcccgtgcagcgattgatggtttagaaaaagcagtcagcgatatgaaacgcctaatgattgaagcaaggctttaatactaatccgcaataatattaatcattttgagggattaaacctgtcgctatctacgaggttttattgcctcaaaatagactacttaattaagcgaattggtataagctttgaactgccgcccttttataggcgctggcaagtttgaatactgagcgcggtggatgtgatatccaccgcgtttttatttactcagataaacaataaattgtgcaagtaatgaagaaagccaaggcgaaagacagagtagggccactaaatattgatgttttttcttaaagctttttaaaacaccatcatctattgccgacaagttacctttcttaattgaatgaataaccatcgagttaggttttaccttcattaattgggcttggctttcgtatgtttgccactgttcagcgtaattgttctttacgtaatcgtttgccatcacaccaagccttttatgacaaactatgcaccatacgaacgatagcgatacaaaaacaaaaaatgaaataaaaaacatttatcttccttgagattctttctaacttttattgctcttccatacctgcatcgcttaacaaattattaagctcatcaattaactcaaacagttcaggctcaatgtaatttaaatcgcaatcgccttttaatgctgtttcgagagtttcggcaagtgattttagttttggtacgccggtataacaacatgcgccatggaacttgtgtactatgctaagtacatgttcgcaatcttctttttctatagcttcattgagcaggcgcaaggtctccggcacgctcagtaatagcatgttaagcatttcaagtgctagttcttctttaccgcctgcgcgttgtagtgctaattgccaatcaagacgagcgctttcaaatggtggctccgaatgaacggcagctgctttacttcgctcacgattaataggtgattgcgggctatgatcgctgatgatttgttttagcatatcttcatcgataggcttggttaagtaacctttaaagccatctttaagaagttgctctttttcacccgccagtgcgtgcgctgtaactgcaatgataggggtatcttcattgagtgatgattcgcgaataagcttacaagcggtaataccatccatgattggcatttgaatatccataaatattaaatcgtatttatggcttttgcttaagctataggcttgagaaccattatgggcggtatcaattaactcaatttgttcttccagaagggtacaaataagctttaagttagcgtcattgtcatcaacgaccaacactttaagtggtaaaagcttttcgtcaccctgttcaatattatgtactgggtgatcaaggcgataaggtgcagccaatatttcacacagtttacggtggttaagcggcttgctaaggcatgcatcagcaccactaccaataaatgcctcacgcatattatgtgacacagtattgagcataatatataaataatcagtcgcaggacgaactgctttcacgtagcttttcagctgctgcatatcatctattgtggcagtatgaccaataatacagatgtcatagctgaaatctttattgatctcgtttaagaaactttcttcatctgtgcacgcagtcacccgcatttgccattcattcaataacgacaatgttgcttgatgagagtgttcatgcggctctaaataaagcacgcgtttattaattaaggattgagtaggtaagtcgctggtaattatattacttggggttctaaataccgcattgaatgtaaagcaggtgccattgccaggagctgagttaagcgttatgcgaccgttcatcgcttcaacaatatgtttagtgatgattaaaccaagcccagtaccaccaaattttcgggtaatacttgagtctgcttggccaaatggtgtgaataacgcatcttgtttatccataggaatacctacacctgtatcagtcactgagaccaaaattgaggcgcgctcttcatcgagcaagcggtagccaacatctattttaatcgaccctttttcagtgaatttaatcgcgttactcaacaggttaattaagatttgtttaaagcgagtcgggtcaccggtcaggttatcaggcacttgtggatgaataaaaattgatagctcaagttgcttttcatgagcgctcggtgccaataaagttaaaacttcattaatattgtcacgcagctggaattgcattgattctagctccatggcaccggcttctaatttagaaaagtccaaaatatcactaataatggtcaataaactgttggccgacagctcaatggtatcaagataatctttttgatgcttatttagcggggttttataaagctggcgtgtaaaaccaattacaccatttaaaggcgtacgtaattcatgactcatcttggctaagaagtctgattttactcggttagcatcttgcgcgtcttttttggcgatacttaactggatattttgggtttcgtactgttcgagtgtttcgcggtaatcagaggttgcttggtcaatgtgtttttgcatttcgtcacgttgcatgaccatggtttgcgaaatcgtattaaggccttctctgagtaactcaaactctccaaacatttttttatcaagaccggtatctactttaccttctattaacctgtcggtagcaagtactaacttattaagtggttgaacaaacatacgggtaagtctaaatgccaaaatagtcgccagtactaacgctaaaataatgacaatgccacttataagcagtgcgcgttgctgaccaatgatagcctgttgtttgttgagcatgataaccacagttcccaatgaagcttggtaactatggtggttccaaatcgaatcttggcgactatgattaacaatggcagttttaaacgttaagtagtgctctgaatttttgacaataataccgtctagtgacgctgagttatcggttataaactctttgaactcactttgatatttactaaaaatgacaagctcattgttctcatcaaaaatagcaattgattgaatagcaggggagtgcttgttatgggtatgactaactaggcgtgttaatagcggtttatcacgcttgagcaagggttgttcaaccgctatagccagcggctcaattattgtcacaccttgttgatataaaatttcatcgagctcaatgtaacgatttattgtaaaataaccgcccagcaacaagcctatgatcacagtcggtattaaagtgagagttaagactgagtcacgtaagccaaatttagtcataaagaatgttgttatcattattatcgttgtttaagagtatatacttacttccgctttatcaataattaaggtgttgcccaatggcacagattttcaaagccaaaaagaaatccgtttcacaaaaaatgctaaccctgtctgtcatcgctatggatcatcaaggtcgaggcgttgctaaacaagggagtaaagtttgttttgttaatggtgctttgccgggcgaagaagtaaaagcactgttgatagaagataaggcacgttttgccagtgctgattgtaaaaaagtgctatcagcctcagagcatagggttactcctttttgccaacattatcaggtatgcggtggttgtcagttacaacacctcgatgcaaaacaacagctcgtagaaaagcaagcagcggtgagtcagttgtttagtaaatttgccaaagctgataacttaaactggcaagcgcctttattgagtgatgagcatcattatcgtcgctctgcgcgtattgcagtaatgcacgacaaatccgccaaaaaaatgcgagtagggtatcgagctcaaggctctaagcaattggtgagtattgaaaactgcgatgtgcttacaagcactttcaaagaagtatttgctgtgtttgatgttcttatcaacagtcattcaggtctagatagtattagccacttacaattgtgcgaagctgataacgcggcttttgtggttgttaggcatactaaggcgattaataacgagttaaaaacaatcgtagaatcagcgtgtaatgaatacaactggtgcgtggtatggcaatcacaaagtggtgaaattaatcacagtgatttccctatgccgtactaccagataccagcttatgatttacgctttgagtttggtcttgaaaactttattcaagttaacccgcaagtgaaccaagcgatgctgcatcaagcaaaagagtggttagaacttcaaggtagtgaacaagtgttggatttattttgcggcattggtaacttttcactattaatggcaaagtatgctaaatatgttattggtgttgaaggtgttgattctgcggttgcattagccaaacaaaatgcgcaaactaactctttgtcgaataccgatttttactgttttgatttaacacagccaatgaaatcagcagcttggtttagtgatgattttgatgtgttagtccttgacccgtcacgcactggggcgatggccattttagagcagttaccactaacccagtttaaaacgattttatacgtctcttgtgatcctgttactttagcccgtgacagtgcgattattttacaagcaggctttagcattaagaaaatagggctaatgaatatgttcccgcataccgggcatattgaaacgatggcgttatttcacaggaggtaaagcgcactatggtagccactagacagtcacatcagcttacaaagccgagtgattttgccagccgtatcgagctgttagcgctaacagaagataaacaaatcctattaaagcaggctcatgatttgtgccagcattgtgacgatgcaaaacgtgaaaataccgcaatcgaaatggtggaaattttagccgagctgaacttagacgctgattcgctggcaaccgcatttttgaccccttactttttagccgaaaaaatctcaattgagacagtcaccgaaaagttaggtaatcacgttgcgttattactaaccggcgtcagccaaatggccactattagtaccttagcccatcaaggtaaaggtacagtacaaatcgataatatccgccgtatgctattagccatggttgaagatgtgcgcgccgtggtgattaaactcgcagaacaagtatgtcacttgcgtgatgttaaagacgccagtgaagaagagcgcgttattgccgccaaagaaacacgtgatatttttgctccgctggctaaccgtttagggattggtcaacttaagtgggagcttgaagacttatcgttccgttatttgcacccagatacctataaaaacattgcaaaacagcttgatgataagcgccttgctcgtgaagcttacatggaaaatatggttgctttagtaaagtcaaaactagctgaagcaggcattgaaggtgaagtgtatggccgtcctaagcatatctacagcatttataaaaaaatggcgcagaaaaactacgagtttgatcagctttttgatattcgtgctatgcgcattgtggtggaacgcttgcaagactgttacgccgcattaggtattgtgcataccaattggcgtcatttgaataaagaatttgatgattacatcgcaacaccgaagcaaaacggctatcagtcaatccataccgtggtttttggccctgaaggtaaaaccgtcgaaattcaaattcgtactagcgaaatgcatcaagatgcagagttaggtgtagctgcgcactggatgtataaagagggagcgctacctgggcgaggttcgggctatgaacaaaaaattagctggttgcgcaaactactgcaatggcaagaagaagttgttgatggcagtgacttagccgaagagcttaaaaaccaagtagtagaagaccgcgtttatgtgttcacacccaaaggagatatttatgatttaccactgggtgcgacaccgcttgattttgcctattacattcactcaaatgtaggtcaccgctgtattggtgcaaaagtgtttggcaagattgtgcctttcacttaccagttaagtaccggggatcaggttgaaattttaactcaaaagcaggccaacccaagtcgtgattggttaaacccatcactaggttatatcaagtcgtcgcgtgcacgctctaaaatacatcattggtttaagcaactagaccgagataaaaatttaagcgcgggtaaagaaattttagagactgagctacaaaagttagacctaacaactaaagatctggcgccagcaattgagcgctttaatttgcgtggccttgaagatttaatggtggctgttggtgctggggatgttcgtttaaatcagttattaaactttattagtgaccgtgatgatgacgagccacaaattaagtttaaaaagccgaaaagtgtcaccggcgataaaaacggtatcgttgttgatggtgtaggtagtttaatgagccacgtagcaaaatgctgccgacctgtgccaggcgatgaaatcattggttatatcactcaaggccgagggattgcggttcaccgtgaagattgtgattcgttcgaaaaactacgtgataaacacccagagcgagtgatatcagtaagctggtcagacgatgtaaatggctcgtactcattaactattaaagttgaagccaccgatcgttctgggctaattcgagatatcagctcagtacttgcaaacgaaaaagtaaatgtgctgaacatgaatgttaacacggttgaagataagcaacttgcactgttttcaatgcaggttgaagttcatgacttatcaagcaccaaccgcttattgtcgaagttacaccaaattgaaggtgtccatgaagcaaagcgtggtcattcgtaatgagtgataaacatgccattgagcagtcgttagcgattatggccaaactacgggacccagaatctgggtgcccgtgggatttaaaacaagattttaaatcgattgtgccgcacacccttgaagaagcttacgaagtagcagactgcattgaaaaaggtgagcttactgagcttaaaagtgagcttggcgatttactgtttcaagttattttttatgctcagcttgctaaagaacaagggttatttgattttgccgatgtggctaatacgcttaatgataaattagtgcgtcgtcatccccatgtatttgcagagcaaagtgatctatcggatgctgaactttctgcgcagtggcaggctataaaagcacaagagcgagcagaaaaatcagcctcaccacaaatgagcctttggcaagatatacctgatgcgatgccgggactgtcaaaagcgaagaagattcaacagcgtgtggcaagcctagggtttgattggccaagctatcatggggcacttgataaagttgcggaagaagtagacgaagtaaaagaagcgctggctcatgatccacattctgagcacagcgccgaagaaattggtgatttactgtttgcaacagtgaatgtagcgcgtcatattaagcgcgatccagagcaattattacgaagtgccaatgctaagttcgcgtcacgctttgaaaaagtagccgcttatttacaggagcgtgggcaaagtttagaaacggctagtcttgaagaaatggacaacgcatgggaagccattaaaaagcagttaaaatgagtgtgttgtagaacaggttgggtacagtatggttaagctcgttttttgtgcacttatttgctaattttatctggattgatagcagtgcctttgctacaatatcgccccgtcttgattctatattattccttttaattcctgatattctagggttcgcatgagtacaaaatttatcttcgtaactggcggggttgtttcttcgttgggtaagggtattgcagcagcgtcattagccgctattttagaagcacgtggtcttaacgtgactattttaaagctggatccttacattaacgttgacccaggcactatgagcccaattcagcacggtgaagtatttgtaactgaagacggtgcagaaactgaccttgacttaggtcactatgagcgtttcatccgtaccaagatgactagccgcaacaacttcacacaaggtcgtgtttatgaagatgtattacgacgtgagcgtcgtggtgagtaccttggtgcaacaattcaggttattccacacatcacaaacgacattaagcaacgtgtatacgacggtgctgaaggtcgcgatgtagcaatcgttgaaattggcggtacagttggtgacatcgagtcacaaccattcttagaagcaattcgtcagcttggcactgaaattggccgtgagcgcgcgttgtttatccacctaacgcttgtgccattcttaggccctgcaggtgaagttaaaactaagccaacacaacattctgtaaaagaattacgttcgattggtatccaaccagatatcttaatctgtcgttctgatcgtaaactaccaaataacgagcgcgcgaaaatcgcacttttcactaacgttgaagagaaagctgttatttcattaccagacgtagaaagcatctataagatccctgcgttacttaagtcacaagaattagataacttcgtatgtcgtcgtttctatcttgagtgcccagaagcagatttatctgagtgggaacaagtgttatatcaagagtctaacccaacaggtgaagtgacaattggtatggttggtaaatacatcgaactaccagatgcgtataaatcagtaaacgaagcattaaagcatgcaggtctgaaaaaccgtttaaccgtgaacatcgaatacgttgattcacaagacttagaaagcaaaggtactgagttactttctcaccttgacgctatcttagtaccaggtggcttcggcggccgtggtgttgaaggtaagatcttagcggctaaatatgcacgtgaaaacaaagttccttacttaggcatttgtttaggtatgcaagtagcgcttattgaatatgcgcgtaacgttgcaggccttgaagatgcaaactcaacagagtttaacgctaaatcagcacacccagttgttggtttaatcactgaatggcaagatgctgacggtaacgttgaagtgcgtgatgagcaatctgacttaggtggtactatgcgtttaggcgcacagaagtgtcatttaacaccaggctctaaagtaagcgaagtgtacggtagcgacgagattgtagagcgtcaccgtcaccgttacgaagtgaataatcactacgtagagcagcttgaaaaagcaggcttaagtttcactggtttatctgaagataagaaattagtcgaaattatcgagaataaagatcacccttggtttattgccgcgcaattccacccggaattcacgtcaacaccacgtgatggtcacccgctatttgaagggtttgtcgcagctgcacacactcaccaaaaagcgtcatcgtaattttaataggccgtgctttatgcacggcttatttgttttaataagccaatggcattaaggataattaataaaattggcactaactcaccattttcgggaaaagaggaatcaagatgtcagaaatcgtaaaagtgattggtcgcgaaatcatggactcgcgtggtaacccaactgttgaagctgatgtacatttagctgatggttcatggggccgtgctgcagcaccatctggtgcatcaacaggtactcgcgaagcgcttgaattacgtgatggtgataaagcacgttacctaggtaaaggtgttttaaaagcagtaggctatatcaacaacgaaatcgctgaagcgcttaaaggtcaaaacgcagttgatcaaaaagcggttgaccaagtaatgcttgacttagatggtactgaaaacaaagaaaaactaggtgctaacgctatcttagctgtgtctttagcaacagctaaagcggctgcaaactcaaaaggcgttgagctttatgagcacattgcagaccttaacggcacaccaggtgtttactctatgccattacctatgatgaacatcatcaatggtggtgagcacgctgataactctgttgatattcaagaattcatgatccagccagttggcgctaaaaacttccgtgaagcgttacgtatgggcgctgaagtattccacagcctagcaaaagtacttaaagctgaaggtcactctacatcagttggtgacgaaggtggttttgctcctaaccttgagtcaaacgaagcggcacttgcagcaattaaagtcgctgttgcaaatgcaggttacgagcttggtaaagacatcacgctagcattagactgtgcggcatctgagttctacgacaaagaagctaatatctatgaccttaaaggtgaaggtaaaaaattcacttctgaagagtttaaccacttccttaaagatctgacagagcaatacccaattgtttcaattgaagatggcttagacgagtctgattgggatggttttgctcaccaaacaaaacttattggcgacaaagtacaattagtaggtgatgaccttttcgtaactaacacgaagatcttaaagcgtggtattgataacggtattgctaactcaatccttatcaagttcaaccaaatcggttcattaactgaaacgcttgctgcaatcaaaatggctaaagacgctggcttcacagctgttatctcacaccgttcaggtgaaacagaagatgcaacaattgctgatttagcagtaggtactgcggcaggtcaaatcaaaacgggttcattaagccgttctgaccgtattgctaagtacaaccaattacttcgcattgaagaagtactaggtgaaaaagcaccttacaatggtcttaaagaagttaaaggtcagtaatttggcttagctcattgagactttaaaaacctcctacgggaggtttttttatagctgaaattgctgttttaagatctcgccagtgaagctggtttttaaataaaagccgcgaggtagggtttgtattatttggccgttggggccaattgcatcagtaagtgctttgctattggcagcttttggccttatttgcataacatcgcctaagtgccccgaaatttcatcaacgcgaccaagggctattagctccatttgttcttcccagtccctttgtaaaagggcatcttgctctgcacttggctgccacaaaaagccactgcctatagtgcggtgaaaaggcagtatctcgcgttcgcctaaaataggtaaccataaaacatgattcaactttttacgcacagtactttgctgccaagtcatccctgtaacatttagtagcggcgtgactgaaacaaaggttgtttcgagtggtttgcctttaaacgaaataggcagtgtttttaattcaattcctaactcttcaaaatcaggtgttggttttgagccggctgttgcgccaagcacatattcgataagttgccctgtccagcctttttcacgcagtaaatcgtcaggtgttttaaactggtattgctcagctaattgcccaagggtaaggccggcaatagcatcaacacgttgcattaattcgtttactgaggctggttttattggtcgcataaggcgtttatttgattgtctaattaaccggttcatgatagcaaatgcgcgccttagtggatatctttgtgtttgggtgttttttgcgcatgttaagtgtgagctaaaaataaccagtggaatatgtgggcttgattgtataaccagttgaaatttatatgttttagttgttttgttgcgttgtgcttcgatattaagtgattagttgtttgtataaatacagatatataaacatgtttatccacagtttctgtggagaaagtggatattttaactgtgtattgtggatttgtttgcaaattaggcatgttttataaaagttatgcacaagctgtgggtaaggtggtaaaaaagaggttgtaaatagttattttattcaaacagcgtatttttatcaaaatagctttgtaacaccttgattaaatgggcgtgttaaatgagttattttaaatctcctttatgcttgggtgtaaagtgtttgctgtatcgcgggttatgtggaacaatcaataaaaatcgacttacaaatgaggcactaaggtgattgatgccgaaggttttcgtgccaatgtcggaattgtaatttgcaataatcagggacaagtattttgggctcgtcgttatggtcaacactcttggcaatttccccaaggtggtgtggacgatggtgaaacagcagagcaaaccatgtacagagaattacacgaagaagtgggcttgcttcctgaagacgtcgagatcgtcgcaagttcaaaacattggttacgctataaactacccaaacgtttaattcgcagagactcaagtcctgtgtgtattgggcaaaaacaaaaatggtttttactgaaacttcgttgtaaagatgaagatgtagatttacttaaaactcatcaccccgagtttgatgattggcgatgggtgagttattggtatccggttaggcaagttgtttcgtttaagcgcgatgtatatcgtcgagtaatgaaagagtttgctccgtttgcaatgccgtttaataaacgagagcaacaaaaagatcattggcgacaaaaacgataaggcctgccttatctaatttataggagcagcatcatgttagccacgctcagatcaattgctgaggcagtgtcgcaacaggcggacttaaacagtgcgctagcgtgttttgtgcaaatggtaaaagatgccatgcaaacacagtgctgctcgatttattttgcagattacagtcaagacaactttgtattgatggccacccaaggcctcaacccagatgcggttggaaagtttcgtataggctttactgaaggtctcgttgggcttgttgcacagcgtgaagagcctatcaatattgcttttgcaaagtcacaccctcgctttaaactctcgccagaagttaatgaagaaggctataacgcgtttttatcagtgccagtcgtgcaccaaaaaaaggttttaggcgttattgttgttcaacaaaaattagcgcgggtttttagccctgacgaagagtcatttttaattacgctttcggcacaacttgcttctcagctagcccatgcagaaataaaagagttactaaggctagatgattttgcccatcagacttcggtacttaaaggagtatcgagtgcaccaggcatagcgataggcgaagccttcgtggtgatcccaaagctagattttacgtctatcgaattacaaaaagatgatgacatcagcgctcagcgtaagttattcactcaagctgttgctgcgacgcgtaacgagtttaatactttatctatgacacttagcgattcaatacctcaagaagcgcttgctgtatttgatgtgtaccaacaattacttgatgccaaaagtctaggacaaaatgttgaagcccagcttcaacagggatggagtgctaaaagtgcacttaaaattgttatcgaaaaacttgtttcacagtttaatgccatgcaagacccatacatcaaagaacgtgccgttgatgttaaggatatcggcttgcgggttttacatcacttagtgaataccgaacatgcagcaaagccttaccctaaagatactattttaattgccagtacgctgacaccagcaatgcttgcagaagtgccaaaagggcatttagcaggggtggtgagtgtgaacggggccgcgaacagccatgcttcaattttaacccgcgcgatggggatcccagctatttggggtattgaagatgtgccgttattgcagtttgaaggcaaaccaatgattttagacgcctatgcggggcgtttatatatttctccttcgcaagtgttacacgaagaatatagccaacttaaataccaagaaacgctattaaatgatcgcttttttgcagagcaaagtttagaagctgtaacgcgtgatggtgagcacattagcttactacttaatgcaggccttgagttaaacaccgagcatgataataaacctttctgcgacggtgttgggctttatcgtactgaagcttggtttatgcaaaaaggccagtttccttcccaatctgatcaagaaacttggtaccgcgaagtactaaccagctaccacccgaaccctgtggtgatgcgtactttagatattggtggcgataaagtattagactacttcaacataacagaagaaaacccgtttttaggttggcgcggtatacgcgttactcttgatcaccctgaactttttttagatcaacttagagccatgttaaaagcgaatattggtttaggtaatctaaaaataatgctgccgatgatcagtggttcagaagaagttgatgaatcattaaagctgcttgaacaagcatactttgaattaagtgagcaatatccagagcaagctattgaacgcccagaagtcggggtgatgcttgaggttccttcaagtgtatttatgctcgaagagtggtcacaaaaagtcgatttttgctcagtgggtagtaatgatttaacccaatatatgctcgcagttgaccgttctaatgctcgcgttgccgagttgtttaacccttatcacccaagtgtgctgcgggtgttgttaaaaattgcccaagagtgtcatcaacatgaactgccatttagtttatgtggtgagttaggcggtgacccagaaggcgcattactgctcattgctatgggttatcgaagcttgagtatgaactattcatcaattagtaaaattaagtttgtgctcagacgtttaaatgtcagtgatatggaaaagttacttgcagagtgtttaatgcagccaacggcaaaacacgtacttagattaacgcgcaacttcatgatagagcatcaactgggggaattattttacaccccaagccaagggcaatcatgacgtcaaattgtgctgtgaaacgcccaaagggttggtttaaaagcgatttatactgcgttattgattttaacaatagaaccactattacttgcaatcaatgccttgcctaaatcgcttttaattccaactgaaactcgcatcttgaggtggtttgggtatatatattagtttagtatatgtatataacaaactgaatatttgagtgtgctatgcatgacgtaatacttttaatggtgtactgcgcaattttaggaagcgtagtggggtttttagccgggttgcttgggattggcggtggactaattattgttcctgttcttagtgcgctattagtatcgttcaatgttgccgacccaagccatgtattagtcatcgctatagcaacctcgttagcatccattatttttacctcgacttcttcagcccttgctcatcatcgcaatgctaatgtgccttggcaaatagccccttgggtgatgactggagttgggcttggcgcattgatcagtggctttgcagcaagctttattcctgaacaattattacgttttgtatttgctggcagcgtggtgtttattgcgctcagaatggtgttatcaacccgggctaaagcggctagtgaaaaaccattaccttcaggccccattttaggctttttatgtgccataatgggggctttatcaggacttattggtattggtggtggtgctttaattgtgccgttactgcattatttttctgttgatattaaaaaggccattggttgtgctgctgcatgtggtattgtcattgcgctgtttggttcagtgggctatgtctctgctggatggcaattaacatcattcagtgatggatttgccggatttgtgtatttacctgcgttagtggggattgtggttacctcgtcgcttattgcgccaataggtgccaaagcaacgcattacttgccagtggcaacaataaaaaaagtatttgcgctcttacttgtcataattgcgcttaaaatggtgttcagttaaaggtttttatttatatggctcttcaatttccagatatcgatccggttattttttcggtaggcccgctcagcgtacgttggtacggtttaatgtatttaattggttttgctttggctatgtggcttgctaatcgccaagcagaaaaaccaaactcaggttggacaaaagaacaagtaagtgacctgctattttacggcatgctcggggtaatactcggtggtcgtattggctatgtattgttttatcagtttagttattttattgaaaatccgctttatttattcagaattgaccaaggcggcatgtctttccatggtggtacgctaggtgttattacagcaatagctatatttgcgtggacacgtaaaaagtcattgtttgaagtaggcgactttgttgtacctttagtgccgcttggcctacttgcagggcgtataggtaactttatcaatggtgaattatggggccgagtaactgatgtgccatgggcgtttatcttccctacaggtggtccagagcctcgtcatccatcacaattatacgaagcctttttagaaggtttagtgctgtttttaatcttacaatggtttattaaaaagccacgtccagcgggcagtgttgctggggtgttcttacttggttatggtgtgtttagatttattgttgaatacttccgtgagccagatgctcatttaggtttattcgcaggcgttatttcaatgggacaaatcttatcattgccaatggtcatcggtggccttggtttgttaatatgggcctataaaaagccgcaacacagcgtggcaagcaaagcataacaagagctaatcaatgaaacagtatttagatttatgtcaacgcatcgttgatgaaggtgtgtgggttgaaaataagcgcactggcaccaaatgtttaaccgttattaatgccgatcttgagtatgatgtggcaaacaataagtttccactgatcactacacgcaagagcttttataaggctgcaatcgcagagttacttggttacttgcgtggttacgatagcgctgcacagtttcgtgaaattggctgcatgacttggaatgcaaacgctaacgagaataaggcttggctcgaaaacccccatcgtcgcggcgaagacgacatgggtcgtgtatatggtgtgcaaggccgcagttggcaacgccctgatggcagccaccttgatcagctaaaaaaggtcattgataacttatcaaaaggtattgatgatcgcggtgagatcatcactttttataaccctggtgagtttgagctgggctgtttacgcccttgcatgcacactcataccttttctttgttgggtgatactctatacttaacatcatatcaacgcagctgtgatgtgccgctaggcttaaactttaatcaaatacaatgctttgtgttacttgctttagttgcacaaatcactgggcacaaaccgggcaaggcataccataaaattgctaatgcgcatatttacgaaaatcaactggagttgatgcgtgatgtgcagcttaagcgtgagcctttcgcgtcgccagaattaaaaataaacccaaatattaaatcactagaagacattgaaacctgggttacaaaagacgattttgaagtagtaggttatcagtgtcacgatgcaattaagtatccgttttcagtgtaagaacaataaaatttaaggagaaatcaatgaaagctgtgatcccagttgctggccttggcacgcgaatgttacctgcaacgaaagcgattccaaaagaaatgttgcctattgtcgaccgtcctttgatccaatacgtagtgaatgaagcgatttcggctggtattaaagaaattgttttagttacccattcaagtaaaaactcaattgaaaaccattttgacacgagcttcgagttagaagcgactcttgagaagcgtgttaaacgccaattacttgctgaggtacaatcaatttgccctaaagatgtaaccatcattcatgttcgtcagggtgaagctaaagggctaggtcatgctatcaactgtgcagctccgattattggtaatgaaccatttgtggttattttacctgatgtgatcattgatgatgtagcaagcgaccttaaaaaagacaacttagcagagatgatccaacgctttgaaaaaacaggtgagagccaaattatggtcgagcctgtgccaaaaaacgaagtagacaaatttggtgttgttgacctaggcgatgcaaaaatccagcaaggcgaaagtgcagctattttaaacatggttgagaaaccgccagttgatcaggctccttcaaaccttgcggttgttggccgttacgtattaagcaaaaatatttggccactacttgcaaaaactccagcaggtgccggcgatgaaattcaattaactgacgctattgctatgttgatggaaaaagaaattgttgatgcttattcaatgaaaggcaaaagccatgactgtggtagcaagattggctacttaaaagcaattgttgaatttgcgcttcgcagagaagaatttaaagatgaattaagcgactttattaaatcgcttgttaaatagttaagctatctaattaaaaataataaaaaaagtgcctatacggcactttttttatgtttatttaccttcctaatttttgttcattatgcaaataatgacttttctgatatacctttgtcctaacacattgttatgattgaatgtaattaaaatgtttcattgcatattggttgataatttattctactcaagtgttgaaacctagctcattgcattatttgccattttaggacgtagacttgaagtggatgttttttcatggccgctttttgaaacgctaaataaaaaacaatgtgttagtatttttatttgatacctaaaatgatcttattcgccttggtgtacaggtaagtgctaacagcgagtcttcttgaatgagaagaaattttttatggtatgtttaagaactctgattatgaaatgttgtgtgaagcctttacgttacagtatatgcctagtggcgtgtttgactgtgtcaggttgcaataatacgacaacctcttttctttcccctaaacaatggcctttattgcaccttgtgcaattgttgagtcaaaatattataaaagtagatagctctccctttttagttaaccaacacgcagcgcttgaaacagttcctgctggttcattgaatagcacgctaattgagcaaccgtttaaacatgagtatgcctatgctgtgcagcttgcatcggttcaatcaaagccattactcgcttattctgttaaaaaaatgaccaagcgtgcccccaatatttttcaaggtgagcctattttaaatattgaaaccgctactgttgagcaacacacgttttatcgtcttaaatatggtggttacaagtattttaaaaacgcacaagcagactgcgaagccataaaacgtcaagggattgattgcttcgtaagcaagtacacggataatcgcgtttacttttaatgtaattctttttaactgggttggcattttgtttgctagaatttatgcctattttttagagttgacgtttacatgattttttttactcttcttaggcatttgttcattatcttaagtttattaactttggcagcgtgtatgatgacgcaagagcaagatgagcctgtttacactaagcagcaagtgcaacctgagctcactactgacaataatcaagctgcaggtgtgcagctggggctatatttgtcagtgaataaagtgagtcatcaagtattgaagctaaaacatgattatcctaatgctttacaagggcttagttttcgctttaaacagcgtgatcaaaagggagtcactttgtatgcgctgcgtgcaggaccttttaaaaactacagccaggccagcgctttttgtgagattgctaaaaaaatgggtcagtcatgtgtaactgcaacatttgttggggagatgctttaactattgctttttgtattaaataataatcgcagctactttgctcttcataattaccagcctcacatactcggcctgagtagcgattataaacagcaagcagacttatcattaaaaggcttattcgcttagataaataccaacccgaaatacagaaaccacttaaagggataagcctgaagctagctgcgttaaaaattacttatctacgattgtatggatgcagagggtagggcaatgcaggagcaactgccaggaacagctaaataatcaaactggtatcagagtttctcgtttctagactatcaaggtaaatctcgccaataataatagttaggcataattattgctttaaatttgtcatgttgaaagaggatggcaaatatgcgtctgttagtttatttcgtttttttagtgttagtgggttgtagcttaaccgaagagcaacaaaaaacgccccctagagaaacgccaaaatcaccgatggctccttatacagtgcatcaatatgttactgatttaagtagtcagttaagtcgtattcaaggcccttacaaaggtaatgcgcgcattgctgttacgagcttttacatggcagatggcttggggactaagttggcgcaagatcaaggcagtggcttgagtcagcaaattcaagagagcttacttacgcaatttacccagctaggctttcatactatcgaatatcgactagaaaatactttaaatttgcagtcaacggccgatagtgtacttagtcgcgatataaaaaccttacgccaacgtcagaatattgactttgttattaccggcacacttacccggcaacaacatgcctatatagtgaatgctcgactcgtcaatacaaaagatcagcgtgttgtatctgcggcaagtacagagatcccgataaacgttatgtggggagctgaaaaagtacagcagcgtaatggtcagttgtatcgaagcgaatattaagaggaattcaattaatgaaacgtttaattttaagtatgtgtttgcctatgggatttggttgctcttcgatgcttgctagtgatacacctgaacagcacgatgaaccgcagctaatggctcaacgagaagtggctgccccgcatagtaacgacagcgtatttcaaactaatcaagccgtgttaaacaacagtagttttaccgcagcgccaactcgtaaaaatatcaatcattatgtacgtggcatcatgcaagatttagttgaaaacttgcaatatgtgaacgataaaactcctattgctgtttcaagctttgtgtatctagatgcagactacaactcaaccacgttactaggtaaccagctcgctgaaagttttattcacgaactgcatacctttggtgtacctgttgtcgatttcaaaacgaccgattacatgcgtgtaacgcctagtggtgattatgtatttagccgagattatttagagcttaaccaagaccaaaactttaattatgtgctagccggcaccctagttaaccatcaaagcggggtactggtgaatgctcgtatcgttggtttggcaagtaaagccgtggtgggatctgcacaagggtttattccgcaatctgtggtcgatgccttagatagcaccaatcgtagcgacggaataatgctaaaacaagcaagtgagtaaggtatgaaaggtattttcttagcattcatattattagcgctgtctggttgccaattacttgctgagcaaggcgaggcaaatcaaagcacggctaacaccacatcatcacaagctgattatgttgctatgttgcaagagctcgagcaaaaagagtcgcaacaaacgaacgaaaatcaccgcttatttgtgccatatcagcatcataaaacgctggttaattatgttgagcaaatggcacttgaattagttgataccatgcagcaagaaagtgagttaggtattgcaataacgacgtttgtcgatcttgatacaagcttaaaaagcagctcgcaacttggcaatcaaatcgccgagtctatgatgtatcaactacaaaagtttggttatggggttgttgattttaaagcgatggatgtgattaacgtaaccgcccgcggtgattttgttatgtcgcgtgacgtagaagagcttgctgagcgccgtatcgctagccatgtgttagcaggcacactaatctatcgaaccaatggtgtagaagtaaatgcccgagtagtgaatttaaattccaaactcgttgttgctagcgcgcaaaaagtgatcccgtactttgtactcaaaaatgagtcgattcaattagcaacagccaaactaaattagcagcttattaataccaatcggtaaagtaccttaccgattggtacaaatgcttgattcaaaaagccttagcccgttataattttagctacaagctacaagctacaagctacaagctacaagctacaagctacaagctacaagctacaagctacaagctttacctcagcttttgagtggcctcttagttaaatggatataacggccccctcctaaggggcagttacaggttcgattcctgtaggggctaccaaacctcaccttttgaatatcacccccaataatttcaccataaatgtaattattaatgaccaaagtaatactgaaaatttttaaagtctattaaggtagactttaatagaggtattgtaattatttacatataaagtctattatattggactttattttatttttaagtcttataactgtaaaagtcttttaaagtagactttatttggttttatggtataagttgaaattaaagtctgatagattagactttaatagaaacattgttcaaattgagattgtgatggcaaagaaagttaaagcgagtaaatccccagatttaagtagggcgttcacaccttctttgcttggtgacgttattaaagcgaagagaacacaaagcaatatcacgcaaactgacgctgcattactttcgggtatatcaaagcagacatacataaatattgaacaaggtagtgctgatgtaaaagtggcctcgttaatgaaagttgtctcggcattaggcgtaaagatatcaattgagccatggcaaagtgatagcacagctaactcaccgctggaggatgagaatgacgtctgggtctgatagatatacgcttgatataatttatagccaaaagctggttggtaaattacatctttctagagaaagcgataatttatcattgagttatcaacaagagtgggtggatgagggctttccaatatctcctcatttaccttttagacatgacataccttctgtcaatatcagacgttttttacaaaacttactacccgaaaataagggtctagattatttaatagattacttaggggtatcacggacgaatgtatttgctcagatcggtggaattggtaaagatacctctggggctatgatgtttttacctgaaggtgctttaaacgataaagtaaaaagtaactttatcgctattggtgatgctgaactgatcaaaaagttatctgatcctcaactttggcatttggaagtctgggacggcaaaccaagattgtcagtagcaggtgttcaatcaaaattaaatgtattgtcagttgatggcaagttaggttttggtgaaggagacctttgttctacccatattattaagtttgaaaagaataatcagcaacatcttgttataaatgaatttgtaacaatgaaacttgcaaaactagctgggctaagtgttgcagaggttgaacttaaatattttgatcaccaccctgcattacttgtagaaagattcgatagaaaattgtttagccctgaaagtgtaaagcgcaggcatatgattgatgcatgccaagcttgtaatttaggggttgataaaaagtacgaaagaaatttaggtaaacagcgagacgttcgtcacattcgtgatggtgcaagctttgaaaaattgtttgcgctatctaaactctgcgaaaaccctatagcggcaaaaattgaaattttaaagtgggcgttatttaatctttgtatctacaactcagatgcacatggcaaaaactttagcttttttgtgcaaaaatcaggtctaacccctgcgccattttatgatttagtaaacgttaaaatgtatccagagtttgaacaggatctagctatgagtataggagatgagtttgaccctgatgcaattaatgcctatcagttagttgactttgcagatgaaaatggaatttcaaaaaagttactacaaagccatctaactaaaatagcgacaagtattaaaaataatttacaacaggcgatatcgcttgttgatagtccttcaaaatcacaagtgtcatatttaaagcattactttgatatagttaatgcacgttgtgagcactttcttgaacaggcaactgtaatccctgatatcgaactatagtttagtttatagcttagaaattaacgtttgattgttaatttctaaattgcagggttattactcgtttttaaactaaattaacccgttactttttcaagctcacctgtgcgccatggttcaatgatgattttgatatggtcatttggtttaaataaggtatcaaacgcaccttgtacgccgtctatgccgactttaccagtgcgcattttttgccatgcgatcttgcctgacgcgatgttctcaagtgattgtgcaaactcttctggctggtagtaataagagaaaataaggtctaactctttcactgtggcataggcaaagttaacgtttagtggcgcggtatgtacacctgttacaacgatttttgcttttgctggcgcccgtaaaatgtagtcgtttaataagcggcttacaccagcacattcaaaaataaccactttattattgtctgcaagggctgctgctttggctacttcatcatctagggtcgggttaacatattcagtcgcaccaaactcaagagcgacgtgttttttactctcttgtgggtctgaggcaataatatgtttaacaccttgcaatctaagtgctgcaattgcggcaaggccaattgggccacaaccaaccacgattgctatgtcgtcattactcatttgtgcgcggtttaccgcatgcaagccaacagcaaggggttctgtaatggctgcggcttccgatggtactgcatcaggaataggtaataacaaagcttcatcaacgataaagtattcagaataggcaccatacagccctggggttacacctacgccagcaccgccggcagagagtaagattggcactgaggttacacgggtgcctttagcaagttcgcctttggtatttgggccgtagctgacgatttctgccgcatactcgtgacctagtaatacttcttggtcatcacctgcatcgtttgccatgatgcccaagtttttatagatatcaaatacatcactggtatggcgggtgatatgaatatctgaaccgcaaataccgcaagcaaggctttttacgagtacttggcctggtcctggtgttggaatatcaatttgttttacatgcagtttaccattttgcatggcaacagagttcatttgggtcatttgtgtgtcctcgatcaatcacgaagaagtttcttcgtttcgatctctagactaaagtaaagtgactggtgatatcttgactttttacgccaaaaatacaacaaattgcgacaatactgtttataaattcttcatttatgattttttaaaacaaaaagatcatgagtatttattggtttcttggtgcgaatttaaaacgagtaagcctttaattgtcgatagaattgaagttaaaaccctaaactaaccatcagggttttaactttgacattttcagggtttagccgaaataggcagtattgaggtataaatgagtaaatacaccagcaaagtaacccagtaaaatgacaggcgaccattttaagtggctattaaatgtgtaaatccctcgtgcttggcccattagtgcaacacccgcagctgaaccaattgatagtaaactaccgccaatcccagctgttagggtgatcaaaagccattgaccatgagacatctctggcatcatttgaagaacagcaaacatcacaggaatgttatctactaccgctgacatcaagcctaatataatatttgcgccagttgcagaccaattcgtataaagtaaatcagaaagcagtgctaaatagcctataaaccctaaaccaccgacgcaaataacaataccgtagaagaacaataatgtatcccactcagcacgtgatacccggctaaatacatcaaaaggaacaacgttacctaggcgagacaagcgctctttatctccttcacgctctgccatcgcgcgttttctggcaagcgagccgggcagggtgactcgtaaaaagtaaccaaaaaattgtaagtaacctaaacccatcatcatgcctacaacaggaggtaagccaaaggctgtttttagtactacggcagttaaaattgttaataaaaacaggcataagattcgtagtgcaccgcgttttaattcaatatcttcgtcgacagtatcagggtgtttattattgatgaataaagacattaccgccgctggaatgatatagcttacaagtgcaggtaaaaacaatacaaaaaactctgtaaattcaacaacgtcagcttgccaaaccattagcgtggtaatgtctccaaacgggctgaatgcaccgccggcattggctgctatcacaatgttaatgcatgacatggcgataaagcggttatcatttgcggcaactttcattacgactgcacacaatagtagcgctgttgtgaggttatcggcgatgggtgaaatacaaaaagccagtacgccactgatccaaaataattgtttataactaaagcctctggcgaccagccaacaacgtaggccatcaaacagtctgcgctcttctaaggcattaatataggtcatggcgaccaatagaaatagcatcagttcagagaactctagcaaggcatggcgaaatgcatctgtgctcaagtctgacatattgtaagcactgtattgccaagcaattaatgtccaaatgataccagcagcaacaagaacgggttttgacttacgtagatggattttttcttcaaggataaccagtacataagcgaagataaaaatgacaaggcagataataccaacagggtgggtgagtagatcgatagtaccggttgacgcagcatgagcttggccagcgaaacttagcaaggacaggatcaatccttgtagtagttttttcattgtatgttccaattaattcattttaatttcgttacgggttgtgtgcatgtagctgcagacattttagattcattcttttggttatgtaacaaattagtaactaagaggttagtattttgaatataaatatggatgatggcgagagcagaccagttgcttaatctatatattaatcaataagttgtgggggtttgaattgaaaagggctgcatagtgcagccctaacttgaaaattatgcaaagtgtttctctaaatcgtcagaaccacctatatgctcaccacctataaatacttgtggtaccgtttcacggcctgaaatggcttttaaactcgttaatgaagcatgtttacctaaaataatttcttcgtaaacataacctttgctgtctaacaatgccttagcttttgtgcaaaatgggcagttaggtttagtaataatgctcactggctcaggctttacttgagctgggttaatatattcaagcattgtatcagcgtcagatacctcaaatgggtcgcctggcttttgtggctcaatgaacattttttcaataacgccatctttcactagcatcgagtagcgccagctacgcttgccaaatcctaagtcgtttttgtcgactagcatacccatgccatcagtaaattcgccgttgccatctggtaatagggtgatgttttgcgcttcttgattttgtgcccaagcattcattacaaaggtatcatttactgatatacacacaatgtcatcaacaccattttgcttaaacacacctgaaagttcattgtaacgtggcaagtgagttgatgagcaagttggtgtaaatgcgccgggtaatgcaaatagcacaaccgttttacctttaaaaatttcatcagtagttactgacttccattgctcgtctacacgggttgcgaatgtaacgtttggtactttttgaccttcaatattgtttagcattgttttaattcctcttgatttgttgagtgctattatgtcgcccatagcttaatagttccaatcgtttgtttttatcgttatgatagttaaaaactattgatgagtttgcgatgaatttaaaagattttgaatatgtaaaagcggtagcgcagtttaaacactttcgtaaagccgcagatgcttgttatgtcagtcagccaactctcagtggacaaattaaaaagcttgaacaagagcttggagtgacaatatttgatcgctctactaaacaagtaaccttaactgcacaaggaacgcgtttacttagtcaaatctctcttatccttgaacaaaccaaggtgcttaaagagttggcggcaagctctcacgatccactcaaggggaaggttaatgttggtattattcctaccatcgcgccttatttattgccgaccttgttaacttcaatgaagcaggccttcaacgaaacacaattttcattcattgaaatgcaaaccgcacaaatactgacagcactcgatgccggcgatattgatattgcgattgtcgctgatgtgccagatttagcgagctatcatatttcgtctttgtataaagaagattttttagtggcagtgtctgaacaacacccacttgcaagccgaacagaggtggcactgcgtgagttaaacgaatgcgatattttaatgctaaacgaggggcattgctttaaagagcaagctgaacagttctgtttttcggcaggagttgaagtgtctaatcagtacaaaggtaatagcatcgaaactttacttgcgctggtggcgatgaatgacggcattacctttgtaccaaaactagcatgtacagcacgtgcaggaataaattaccttacgatgaaaccaaaccagcaacgtcatgtggttattgcaacgcgtaagcattacccacatattgctggagtagagttgttagcgcaatggctaagccatcatgaaggtttaaaagctcatttgctcttttccagctagttcaacaatatcgttaatctgaatatttggcagtggctgttggtcaatgcttattgcaaccgcagactgctgataaagctgtgtaacttttaactggtttaacgtggttatcttatggggcaacttgttaccttgcgcatcggttaagtaattatgatgtgcaatatttagtatttgcccttgttcaagaccatgcgctttaccaagattaatgattagcctatcgttttcaatatgtagaattttaccttgagtaggtaagcaagccataactgcttgcaagtcataggtcaatgtttggtttatgtcggtaatggctttgccataatcggttgcccaaaatcggtcgctgtaaacatcgataatttcggtttttttgtatggccaaatcccttctgtttgatagcttttttgccaaagtttttcgtatgtcgtgccatcaaataacacatagtcaactttgtatgcgcgcttaaaactatcgtcttgccaaaaagcatagtcgttattgattttatggttgaccgataagtcgcgaatacgacttaacaatacatattgcgaattgctgcggctggtgatctcttcaagcaatgcattactgtagtcatattgctgtgtaaagaaatgatcgactctaagcggcaaattataataagccgtgggtttagcagccatttgagtgttctctaagctggtatacaggtgctcactaatcgctttgtttacgtcaaaaatttggcccatacgagcttgttcacgattagccaactggctttgtgtaactgcaataaatttagtgtattgatttgctgggcactcttcagcttgtggaaaaatatctaaacgcagggtaatggcataggtgtcgttatggcggttttcgctgatcaattcaattttttgtatttcaccatggctactgatctttagttgatcttgtgtcaaaaccccgtcaactaaggtttgtacagaggaaactcgagcgccagagaatactaaagcttgcgttatcgcatcttttatcgcggctgactttgcttgactagtatcaccatttttgaccgtagcatgccctgtagactcaaaccattgagctaaactattgtttgaaaaaacaattgcactgactaaaccaagccattttatatttgccataattttaactttcatgctgacacctagcattgatactcatagattacaggtaaatgagcaaggactgtaccagatgtggcattaaacgtgcatatttacgagaaatgagttctaagcggaagcaaattatgcgagcacttttattaagcgggctagttgcctgcacagcattaacaggctgcagcagtattttcgacaagcatgtcgagtatcgctatgtagagcctgataattatccagtacttaaagcaataggttacgcgccaattagcgctcaaccaagtagcaatgagtcgcaacgcaccttacttgcaattaaagcgtcaaagcttgaagcttaccgtgaacttgctgagcaagtgtatgggcaaaaaatttccgcaggcacaacagtgcaaaatagtattgctcaaaacgatcaattacaaagccaggtattaggtgtcataaaaggtgcgcaggttataaaaacttatgcagtaggcgatacctacgcaacagaattacaacttgatatgaaacgcgtacatgacctttatattggcgaaataaaaccacgcgaagtgaaaaaagtaacctattactaggttacaacatcagaaatgtataatctgctctaaaaaataaagcgcgataatttggtattatcgcgctttatttttgtattcaatttaatatcagttgctaggcttttaggttatgtacaattgttttgtcgccttgaaccacactgccgccttggtcgtaggtcatcgatgaaggcgaaccgattaagatatctttaagttgtttaacacttagttgagcttgatgcgcagcatgagcgttaacatcgtttttctttttacattcagcaagtaggctgttcacttgcttaataagagcagtaacgtcgtcatctttagaatcattattgactgatagtttctgcacttctttgtcgatagtttgaatttgttgcagcaaagagattttctgttgggcaatactttttaacccttcgccacgtttcgatgcgattgcattgagttcatcatctaaaagcgcagcaatagactccaagcaagaaacttgttgtgttagtttactggcaattaaatgattatgattagccatagacatcaaactcaaatgcggcgatgttcttcgctagtttttcagcatcaatttggtatttaccttcactaattgctttttttaattcggcaactttgttactgtcaaaaccagacgattgctcagctttttcttgcaaagatttaagctgcttagcttgaggtgttaagcttacagaatctgcacttgcttttggcgcagctgatttagcttcagcagcgttagcattatctttttgtaaatcaagctttttttgcttggtatttgtcaacacagaggtttgttgttgaccattattgacattgcttaccataatatttgacctatacattacccaacatatgcctttatatcggcaggcacagcggatactttagcataaatataaaaaattaaatatttacctgaacagactcgacaccatccacacgtgcatttaatactttacctgattttttgttttttacacgcactaattcgtctaacgtaccatcttcaagggcaatgcctgtcgttttaattctaaggcctcgtagtgaagcgtaaatagtcacgttgtcgcctttacaaaccatgcaaacctgactcattacaattggtgtaccgtcacgcaaattgcgcttaattcgactgccaataagtatagactcatcttgcacatattgcgttctaacaaactgttttggtttcatttcaaggcgtaaatgttcagccctgatcacttcaccacgacttaaatgagttgtcacaacaaccacaggctcaagctcaatgatgcgcacgtgtacgtattgggtccaactatttatatcttcgcacttaagttgtacagttacctgccgattaaaaggaggtgttgttggtacttctttacttaaaggtgattcgcacactctgtcgggtatgcggctatcaagcggcaatgcactcacttgtggtgtactttctagatcagtaagctgctcactaacaaaatcgatagcgatctgttgaagctgctcgtttttatatacttctgcatgcacttgtgtaatggacaacaagctagcaaggaaataaaaaacactgtatcttcggcttttttttaacaaactcatattgtttcgactatgcttatggttgaaaacaaggtataaatattttgcgtcaaaaaacagacgctttgtaaccttatgtagctttaacacaaagaaagcaattattgttccggctctgattgtttatctttaggagattgaaatggcaggcattttagactcagtgaaccagcgcacgcagttggttgggcaaaaccgccttgaattactattattcaaactcagagggcgacaacgctttggtatcaatgtgtttaaagtgagagaggttttgcaatgcccaccactcacaaacatgcccaaatctaatgcttatatacgaggcgtagctcacattcgcggtcagactatttcagtcattgatttatcaatggccgttggcggtcctgctatcgaaaatatcaaagacagctttattatcattgctgaatacaaccgctctgtgcaggggtttttagttggcggtgttgaacgtatcgttaatatgaattgggaaaaaataatgcctccaccatcaggtgcgggtcgttattcttacctaactgcggtcaccgaaatcgaaaacgagctggttgaaattctagacgtagaaaaaatcttgaatgaaatttgccctgtaaatacagaagtaagtgcagaagtagtgggtgatggtgaaatccagcgagacttaggtgaacgtattgtctttatagcagacgactctgctgttgcgcgaaaccaagttaaacgagcgcttgagccattaggtgtacaaactgagctcgctaaaaatggtaaagaggctttattacggttacgtgagattgcaaaactcgattgccaaaacgatattaccgaacgcgtaggattattaatttcagatgttgaaatgcctgaaatggatggttatacccttacggcagagataaaagcggatccaaaattatcacctttgcatgtgatcttacacacttctttaagcggtgtatttaaccaagcaatgatccaaaaagtaggtgcagatgattttattgcaaaatttaaccctgacgaattagcaacggctgttaaaaagtgggttcattgtgattaattatttataggtggtattactttggaaaataagcacttacaacaaagcgaatacgatcaatttcgctcttttctagagcaacagtgtggcattgtgttaggcgacaataagctttacctagtgaaaagtcgtcttgcgccattaatggtgcgctttaatgttgagtctttatcgcagttagttagtaaaacgctcagtccacatgaaagacagcttcgtgctgctgttgtggatgcgatgacgacgaatgaaaccttatggtttcgtgatcaatacccatttgaattgcttaaaacaaagctgtttcctgagttgaaagacgtgcgtaggccactaaaaatctggtcagcggcaagttcatcaggccaagagccgtattcaattgctatgtcggttgctgagtttcaggcgaaaaaccctggcgtacttaaaatgggcgcgcagattatcggcactgatatatctaataccatgcttgatatgtgtaaaaatgctgaatatgactcgttggcactagcccgtggtttatcaattgaaagacggcaaaagttttttaaagacagcggcaatggcatggcgcaggtgattgatccaatcaaaaaaatggtgagctttaggcatttgaatttattagattcttacgccttaatgggcaagtttgatatcattttttgccgcaatgtactgatctacttctctccagaggtaaaagcaaagattatctctcaatttgctcaggcccttaatccaaaagggtatttatttttaggggcatctgaatctatggctggcttaagtgatagcttcgagatggttcgttgtaacccaggtattatctaccagaaaaagtaatctcttcttagcaacctagctcttaggttgctaaattatttattattcaaaagcttaccgtgctttatctatctagttaattttggcttgccttttgcatctgcactagcagagtcaattttttggagatggttatggctatcagttttgataaagcatttggtgtgcacccgcatgcaatgttgatccgttcacaacgcgctgagttattagcgacaaacatcgctaatgctgatacgccgggctacaaagcaaaagatatcgattttgcggcggctctaaaagcggcaaaaagcaaccagcaaggcggcaataacatggtacgaactgacgcaaaacaccttgccggtggcagtcggtttgttggtaacgcagaaatgtttcgtacgccaaatcaagcagatacaggtgatggtaactcagttgatatacaagtggaacgaaacttgtatgtacagaactcattagagtatcaggcaagcctgcaatttatgagtagtaaaattaaaggccttaaaaaagccctcggtagtcaaggagcttaatcatgagtttatataatgtttttgatatttcaggcactggtatgagcgcgcaaaatgtgcgtcttaatacaacagcaagtaatatctcgaatgcgaatacgattagctctagtcaagacaaaacataccgagcgcgccatcctgtttttgctgcggagttgactaaagcgtcagcaacacaaagcaatcctcagggctcttctgttggcgtaaaagtgttgggtattgttgagagcgataagcctctgcaaatagagtacaaccctaatcaccccagtgcggatgaaaacggttatatctacaaacctaacgttaatgtcgtagaagaaatggctaatatgatttctgcctctcgctcttaccaaacaaatgtgcaagttgctgatgcagctaagcaaatgttaagtaaaacactgttgcttgggcagcggtaaccgaggataagttatgagtaacgacatcagcagtgcgtcatccacgtatttagataatttacgttggcaggacaatcaaaacaaaccagaagagaaagatgacactttaacgcaagaagacttcttctcgcttttaacacaacagttgtcgtttcaagacccaagcaagccagctgataatgatcaaatgattgctcagatgaccaactttaccatggctgaagggatctcgaatttaaactcaaaatttgatgcacttactgcgtcaatgacatcgaactcggcattacaagcttcgaccttagttggtaaacaagcactattagaatcaaatacgattgattttgatggtagtaacgttgctaagggatcggcaattgcagaaacgcctgttgaagatcttacgcttcgcattactgatgagtcaggtcaacttgtacgtaccatcagcatgggcgctcaatcggctggcgcagttcgttttgagtgggatggtaaaaatgacgatggagagcttttgcctccaggcgaatacgaagttaaagctgaaggattccaaaatggtgactatagcagtctacctttagcgactttcaaaaatattgaaagcgttaatatcaatggatctagcggcattattattaatactaaagaaggcgcggttaggctaactgatgttgcagaaatcgcttaattacacagattaactagttagcctagtgctacagattgacactttagaggtgacttatgagcttcaatattgcattaaccggccttgctgccgcgcaaaaagacttagatgtaacagcaaacaatattgctaacgttaacaccacaggctttaaagagtctcgtgctgagtttgctgatgtgtacgcatcatcagtatttagctcaggtaaaactaaaaatggtgacggcgtaagaactacaatggtggcacaacaattccaccaaggttcattatctttcactaataactcactggacttagcaattactggtgaaggctactttgccatggcaaatgacctaggtgcacaagattttacatatactcgtgctggtgcgttcaaactgaataaagacaactttattgtggatgctagcggaaactacttacaaggtttccctgttgatgaagcaacgggtgatacaacttctgttagtttaagcacatcttctgcgctacaaattcctgatgcatcaggttctccacgcgctacgacaaatgtttattcgtcgtttaacttagattcgcgtgcattaacgccagcagttacaccatttgaccctgagacaagtgcgtcgtataacagttcaacatcaacaacagtgtatgattctttaggtgagccacacattttacagttcttctttgttaaaactgacgcagcagtgactggtaatgacaatgaatggcaagtgtttgcaacacttgatgaaaagccgtttgctgctaatggtactgagcaaactacgtcgccatatacgcctatttcaacttttcagtttgactcaagtggtttacctcaaagcactgatgggactccaaatacagatgctacgtttaatccattaacaataccttcaggcggtatatctggtttattatctaacggtgcgagtttccctgatgatgtaaacatcaattggcgcgatgaagctggtacaacgaataaaataccgactcaatatgcaagtaactttgaagtgaaagcgctagagcaagatggtgcgactgtaggacgtctatcaggtattgatattggtacagatggtaaaatcgttgcttcttacagtaatggtgatacttcattcttaggccaagtggcaatggtgcgcttttctaactcacaaggtttacagcaagtgggtaacacggcatggaagaaaagcttaacctctggtgagccaattgccggtgaaccaggttcaggtacattaggttcaattaactcatcagcccttgagcagtcaaacgttaacttaacaagtgaacttgttgatttgatcagtgctcaacgtaacttccaagcaaattcacgtgcattagaagttaactcaacactacagcaaaacatcctacagatccgttaatcttaacggctctgagcttaatccgacacgaaggctgctccctcaattggcagccttttttcatttttaccatcctgtttatgcgtcaattttactttggcacttttattgcatttctttagttatcgtatttttagtgagtcaatgttatggacaaaatggtctacattgccatgtctggtgccaagcaaagcttgcgtggtcttgagttaaaggctaacaaccttgctaatgctaacaccactggctttaaagctgattttgcacaagcgcgttccatgcaggcttttggtgaaggcttgccatcacgtgtgtttgcgatgcaagagcgtcctggttcaaatatggaatcgggtggattcgttgagacaggccgagagcttgatattgccatgagcgaccgtggttggctcagtgtgcaagatgcatcaggtaacgaagcttataccaaaacaggcacactaaacatcacacctgacggcgcattgatcaccagccatggccgtcaagttattggcgagggcgggcctattatcttgcctttgccaattgagaaggttgagtttagcgaagatggcgcgatccaagtgcgcccgcaaggtgcacctgccaactttttagaagtggttgaccgcttaaaagtgatcgaagctgataacactcagcttgaaaaaggtaatgacggtttatttagaccaaaagaagatatgttggtcaatgatctttgtgggttctgtgatatttcacccaatgtaaaagtactgtcaggtacgcttgaaatgtcgaacgttaatccagtccatgaaatggtcgacatgatcagcaaccaacgccaatttgaattacaagttaaattgatgaaaacagccgaagagcttgatgagcgtcaagatcagctgttacgcattgtttaagatgactgagagggtagagttatgaatccagcattgtggatcagtaaaaccgggcttgacgcccagcaaaccgatatttcggtgatctcaaataatctcgcgaatgccagcacggtcggttacaaaaaaagccgcgccgtatttgaagatttactatatcaaaacattaatcaaccaggtggtcgttcgtctcaagatactgaaatgccatcaggtttaatgcttggtgccggtgctaaggttgtagcaaaccaaaagaacttttcgcaaggtaatatgttaacgaccgaaaattcactggactggatgatttcaggcccaggtttttttgaagtacagctacctgacggcaatattgcttactcacgtaatggtcaatttacgacagatgaagacggtcgtatcgtaacttctggtgcgggtttcccgttgcaacctgaaatgaatgtgccaaatgatgcgcaatcaattacggtgtcacaagatggcgaagtatctgttcgtgtagcaggtcaggcagaaaatgtggtaattggtcagctcactataacagacttcatcaatccatcgggtcttgagccaatggggcaaaacttatacacagaaacagctgtaagtggcgcaccagtgcaaggtaatccggggattgatggtttaggtactgtggtacaaggttcgcttgagacgtcaaatgtaaatgtaacagaagagctggttaacctgattgaaacgcaacgaatttatgaaatgaattcaaaagtgatttcagcagtggatgaaatgcttagttacatcaatcaacagttataagtcataggaggcagcatgcgtaatcttatcttagtcacatcagcagcttttatgctgggtggttgtataacaacgcaaaatcatcatgtggttcaggatgacccttactatgcgcctatgtacccagagcctacaacagaacaaatggtgccaacagggtctttgtttgatagctatacatcaaacgatttgtactctgataaaaaggcactgcgtgctggcgatatcatcactgttaaattgcaagagtcaacgcaagcaaccaaagcagcaaaaaccgaaaccgataaagaaacagatgctaacttagaccctgtaattgggttaggtggaaacccggttaacattggtggtgacagcattcaatttggcattggttcagggtcatcatttaaaggtgactcaaagtcgaatcaatcgaatagtctatttggtgatatctctgtcaatgtaatgcgcgttttacctaatggaaacttagtgatccgtggtgaaaagtggctcacgttaaataccggtgaagagtttattcgtttggaagggttagttcgtccagaagatgtctcagcaagtaatacagtcacgtcaaaccgtatagcgaatgcacgtatacaatattctggtaaagggcaaatgcaagaaacacaaagtgctggctggctttctcgattctttagcagttcgcttttcccattttagaggaacaaagtcatgaatgggtttaaatacattattgctctttgcttaatcagcctgcagttttctgctcaagctgagcgagttaaagatgtgtctatggttgagggtgtacgctctaaccagttggtaggctatggccttgttgttggtttgccaggcacaggtgagcaaagccggttcacacaacaaagttttaaagccatgctaaatggctttggtatcactttacctgatagcttaaaacccaaaataaagaatgtcgcagcggtggctgtgcacgccgagcttccagcgtttagaaagcctgggcaaactattgatattacggtttcgtctataggtagtgcgggcagtttacgtggcggtactttattacaaaccttcttaaaaggggttgatggcaatacttatgcgattgcacaaggcagcttagttgtgggcggtctaggtgctgaaggtgctgatggtagccgagttattattaacacaccaacagtaggtcgtattccaaatggtgcaattgtagaacgtgctattaaaagcccgtttatgcaaggcgattacattacttttaatttaaatcgtccagatttcacaacagcaaagcgcttagagcaaaccattaacgatttagtgggccctgatagtgcacaggcaatcgatgcagcctcagtacgcgtgttagcaccgcgtgatgcgtctcaacgtgttgcttatttgtctactcttgaaaacttagagtttaaacctgcagacacagcagcgaaaataattgttaactctcgtaccggtaccattgtgattggcaaaaacgtgaagctacagcctgcggctattacgcatggtggattaacggtgacgatcgctgagcagcaaaatgtatcgcagccaaatgcgttaagtgagggtgaaaccacagttaccaatcaaagcattattgatgtgaatgaagatgactcacgtgcttttgtatttaatccaggtgttaatcttgatgatctcgtacgcgcaatcaatgaggttggggctgcaccgggtgacttaatggcaatacttgaagctttaaaagaagcgggggcgataaacgggcaactggttatcatttaaattaaaacgcgctctagggcgcgttttttgttttcatatcttttagcactttttatatctttcactcttcaagcattagctaaaactattgttttaaagttagtcaaaatcaatatcacttattagctattcatttctaaagatttttattggcgcaatttttgcattttaatttgcattattaactattgtgtcaaaaagctgatggatactaatcatctcgacaagcaaaacttttttgatttaggtaacttagactcactacgtcaaagtgccctgaaaagtgatgcctctagcgatgcgtcaaaagaggcgctgaaaaaagcggcggcacaattcgaatctatctttacgcaaatgctgcttaaaagtatgcgtaaagccaatgaggcattcgaagataaagatagcccatttaattcaagtggcgtgaagttctttgaagaaatgcatgaccaacagctttcagtcgagttgtcgtcgaatggctcgctaggcttagctgatttaatcgttcagcagttatcaccagacggtaaacagtttaccccaggctcagtactaagaacgacgactgagtttgatagtgataaacgagcaagagggcaagatgatgctaatgctcaaactaaatcggttacagatactgagctaaatgagcaggctaataatcgttttgacgatgctgaatcgtttattagttctatctgggaacatgccaaaaatgctgcacaaaagattggcctgaatccggcggttatggttgctcaagccgcacttgaaacgggttggggtaaacacatcatcagcaaagcggatggtacaagcagtaacaacttattcaatattaaatcagatcagcgttggcaaggtgataaagcaagtaagcttacccttgagtttgaacaaggcgtgcctgttaaaaaacaagcaagtttccgcgcatatcaatcaattaaagacagtgtgaatgacttcgttgacttcttaaatgaaaacccacgttacgaagaagcactaaaaaacactgcagaacctgctgcctttttagattcgttacaaaaagcaggctatgcaactgatccaaattatgccgataaaataaagcaggtgctgaagcgtgttgagcttcaaagtgtcgctgcttcattggtacgttaaggagtaaaccctcatgtcatttagcttatatgacattgctaatgccggtgtaagagcgaattctgagcttttacaaaccaccagtaaaaacatagcgaatgtgaatactgaaggctatgtgcgtgaacgcactgagttcacaaccatgatcgacaaccaagtgggtcgtggcgaaacgtatcgcttgttaaatgagtttgcccaaaagcaattaaatcgtgatacctcaaataaggcattttttgatcagtttgtaactgaagcaagccgagtagatagcctgttttcagaagaatcaaatagtttatcgaccagtatcaactcgttttttaacaacgtacaagaaagcttaaatcagccttcgtcaagagtcgctcgttcactagtaatgactgatgcacagaacttgattgatcagatggataggttatcgagcatcgtggttgatcaaaaagcggttgtgaatgaacaattagaaatcttctcagatgaggcgaataaccttatccaaaatattagtgatttgaatactaaaattgcggcggtacatggtactgatcgtgagtcagtctctagtggtttatacaatgagcgtgataaagcaattcgtgatttatctgagttgatagatattgaaacacttgatggtaataacggcgaaaaacaagtgtatttaggctcaggtcaagcacttgttatgcaaagcggtacatttaacctgttttcatttagtggcgaccccgatccaaactttaaagagttaaagctcgatgtcaatggtggcaaagctgtgccgcttgaagttgatgtaagtaaattaaaaggcaaaattggtgggctgcttgcttttcgtgatgacattttagtccctgcccagaatcaacttggtcaaatggggttagcgctggcagatgcatttaatcagcaaaaccgcctaggtatggacgccaatggtgaaattggtggtgatatattcgctattccaaccgttgatgcatttagctaccaagccaataccggttcatcaaccatgacggcaacggttgaaccaggtaaaggcagcgaattgccagcaagtgattttattgtcacctataccagtgctaccactgtcgaaattcaagctattgataataaaggtgagccaattggcacagcgtcaacagcgaatgtgacggcaggggtgattgattcatcaaccatcacaggcggtgaagcgtttggtttacagcttaatgtatcaggcacagcaaatgccggtgaccaatttatggtgaagcttaactcacaagcagcaacaacgttagagcttgcaactgagcgtcctgaagacttagcgcttgcttcgcccatacgtactcaaaatgatataaacaataccggtgacgccaatatttcgccgggtacggttactgacatagcaaactcgacgggtattacagtggggcctccacctagtttggctaatagcgatataacattagtaaaaacggcgaatgctaacgagtatcaaatcacagatggtaacggtactagcacctttacaatcacacctccggcagagaatattcttgcgcaagcaggggcgccatatgacagctacggttttgactttaatatagaaggcacacctgctaccggcgatacttttacgcttgaatttaacacaggtggttttgatgataatcgtaatggtttattactggcaggcttacaaactggcgacttagtgcgtcaaaatgttgaagcaagcagcaccgctgataatcataaaacattcaaccaagcatactctggcattgtcactgatattggtgttgttacgagtcaagcgcaaaccaatggtgcggcctttaccgcattggctgatcaatctgaagcttggtacgagtcattatctggtgtaaaccttgatgaggaagcggcaaacctgcttcgttttcagcagtcttatgcggcatcagcgcaggtacttgcaacagcacgtactatttttgacaccttattaagtgcggcgaggtaattatgcgtatttcaaataacatgatgtataagaataaccttaattctattcttaactcacagcaaaatgttaataaagcacaagagcaggttaatacccaaaagcgcgtattaactgctgcggatgatccttcagcaactgcacgtgcgttactttatagtgaccgcattcaaggtaatgaacagttcacaaaaaatatcactatgctgaatagtcgtttaacgacggaagaaagtgtgctgcaaaacatcaaaggcgcacttgaatctgcttatacattatctattcaagcaggtaatggtgcttatagtgatatcgaccgtgaaggtattgctgaagaagttaaagcattgcaaagtacggtgcttgatttaatgaatgcaaaaacggaagacggaaaatatatcttttctggttaccaagataacacgcctacttatagctatgacagtgcatcaggtcgttacgaatacggtggtgaccaaggtcagcacaaaatcaaagtagctgaaggtgtagaaattaaatcaagtgacaatggttttgatacgttcgaaaaagtaaatgcccgtttaaatgtagcgtcaaataacggtactgtgtcaggtggtatcacaagttctaaaatttatgtcacagagcagggcgattttgatagcttccataaatctaactacaatgctgatccggctgcagcagcgaatgcaaatacattaagctttattaccaccacaggtacaccaaatacttacgtggtacagcaagcgggtgtaacaattggcagcggtagctttgatgaaggcaaaattaattttaaaggaatgcaagtcactattgaccctgttgctaacgggcaagttgatgtagacctagaagcaccacaaaaagagaatgcccttaataccttagatgatttaattgctggcctgacagcgccgaacttaacgcaagaagagtttgatcaggtgcttgccgatgctgttgtacagctaaataatgctaaaaaccaagtatcactggttcaagccggtttaggtggccgtttaaacacagcaaagaaaattgaagagtctaatagcgatcttgatattaacaacaaagctgcaaaagccgagttagttgagcttgatatggctgaagcaattacagagctaactaaacaagagactgcactgcaggcatcgcaggccacattcggtcgtttagccaatctttctttgtttgattatctataattaatctaggttaagctcattttttgggcttaacctttaaaacctgctttaaattacctaccaaagagccttttgagcgaaatatttataaagttttaaacgtctacaatacatatctaaaactattttttagctactctaaaatgattgataaagatttttaaaattaattttcatttaaatacaacgatttaaataaaaaatgaaaaattgtttaaaaattcgctaaaggattttttgaccggaccgataacttaattaaccaagcagcgtagcaaataacagttaccgcttaattagagtaagtttgagagtaaatgataagtttacttcgggagaaatatcatggcactttatgtaaatacaaatgttagttcattaaacgcacaaagacaattaatgaattctggtaatgcactagacacttcattccaacgtttatcatcaggtcttcgtatcaatagtgcgaaagatgatgcggcaggtctacaaatttcagaccgtttaacatcacaaattaacggcctaaaccaaggtaatcgtaacgcgaatgatggtatctctttagcacaaacagctgaaggtgcattagacgaagtaacatcaatgttccaacgtatgcgtacacttgcacaacaagcagcaaacggttcaaacactgatgaagaccgtttagcaatccaagaagagatgcgttctctttctgcagaagttaaccgtgttgcaggtgatacaactttcggtggtcaaaacctactagatggtacatacgacgcgaagttccaagtaggtgctgatgcagtacaaacaattaacttcagtatgcaaacggtaggcgctacaacgaatagccttgaagcaaatggcggtttcactatctctggtatcgcgggtgttgctgcaggtgtaactggtaatacactagctgaacttgctgaaggtatcagtgcaattgatagctctgttacagcggcatcactagatttcgcaacgacatttacagcgggtggtatcagtgtatctactcaagcaaatgcacaggctgtactagcaggtatggattcacttatcgcagtagtagataagaaacgtgcagaactaggtgcggtacaaaaccgcttccaatcaacaattcgtaaccaatcgaatattgctgaaaacctaagtgctgctaaatcacgtatcaaagatactgacttcgctcaagaaacagctaacttaactaagatgcaaatcttacaacaagctagccaaacaatcttaagccaagcaaaccaacgtcctcaagcggcattaagcttactaggttaatagttgggaatttgagttgaagtgaagtcaaaactttgactcaaaagaaaagcgcctttgtctaatggggtattaacaaaggcgctaagatcggattataaagcggaggcgctcaaaatcctgacagtagtgttctaacatttgtaagaacataaaatactaagcacagactgtgccatagtttgtgttgatttaacccactctcaacttatctctttcaaggctccttttaggagccttttttcattctgttactattttatcaatagttggcctatttattgctctatttaattcaagttaactaactaacacgcaaagtggcagctttttgccttaggcaacttagaattgccgcctagtaagccactttgtcaaaacacttttaaagtgacttaactttgacagataagaagagagtttattatggctttatatgtaaatactaatgttagcgcattaaatgcacaaagacagttagatcggtctggtacagatttagacacttcatttaagcgtctgtcatcgggtcttcgtattaatagtgctgccgatgatgctgctggtctacagatttctgaccgtttgcaatcacaaatcctaggtcttaaccaaggtaaccgaaatgcaaatgacggtatttctttggcacaaactgctgaaggtgcgttagatgaaattacttcaacgttccaacgtatcagaaccctgtcgcaacaagctgccaatggttctaatacagatgaagaccgattagctcttcaagaagagatccgtcaattatctgctgaagtaaatcgaattgcttcagatacaacctttggtggtcaaaacttactggatggtagttactcagcgagcttccaagtgggtgctgatgcagtgcaagttattggtttcagcatgcagtcagtaggtgctacaacgaatagccttgaagcgaatggtggtttcactatttcaggtatcgctggtatcgctgctgcagttggtggtaaagattacgatgtacttgctgcaggtattagtgctattgatggtacaacaacagcggcctctttaacatttgagtcagtgtttacagctgatggtatcagtgtttcgacccaagtaaatgcacaagctgtgcttgcaggtatggattcactgattgcggttgttgataaaaaacgtgcagagcttggtgctgtgcagaaccgtttccaatcaactattcgtaaccaggctaacatttcagaaaacttgtcagcagcgaaatcgcgaatcaaagatgctgacttcgcagcagaaacggctgcattaactaaaaaccaaattctacagcaagcaagccaaacaattttaggtcaagcaaatcaacgacctcaggctgctttaagcttattacaaggttaaagttaaaaaataaagttaaaaatttacaaataaagctaaagctttcgctttatcagacgataactgagttagagaactataaatctaggactctaagtcggttaaatagcagggtaggggtatcccgctgtttagctataaaatgataaagcggaggctaatatggctttatacgtaaacactaatgtgagttcattgaacgcacaacgccagttaatgaaatctggcaattcacttgatacatcttttcagcgtttatcttcaggtttacgcattaacagtgcaaaagatgatgctgcaggtatgcagattgctaaccgtttaactagccaagttaatggtttaaatcaaggtaaccgaaatgctaacgatggtatttcactagcgcaaactgctgagggtgcacttgacgaagtaacgtcaatgttccaacgtatgcgtacacttgcacagcaagcgtcaaatggtacaaataccgacgaagaccgcttagcactacaagaagaaatccgttcactttcttcagaagtaaaccgtgttgctgcagatactacatttggtggtcaaaaccttcttgatggtagctatgatgcgaagttccaagtaggtgctgatgcagtacaaactatcaacttcagtatgcaaactgtaggtgcaacaacaaatagcctagaagcaaatggtggtttcactatttctggtattgcgggtgttgctgcaggcgtgacaggtaatacactagcagagctagctgaaggtatcagtgcaattgatagctcagttacagctgcatcactagattttgcaacgacatttacagcgggtggtatcagtgtatctacgcaagcaaatgcacaagcagtgcttgcaggtatggactctttaattgctgttgttgacaagaaacgtgcagagctaggtgctgtgcaaaaccgtttccaatctacaattcgtaaccaatcaaatattgctgaaaacttaagtgctgcgaaatcacgtattcaagatacagactttgctcaagagacagctaacttaacgaagatgcaaatcttacaacaagctagccaatcaattttaagtcaagcaaatcaacgtcctcaagtagcgctttcattactaggctaatttacttgatttataagccactttggacttaggcattttttcctgaagtggcttatacttttgactatgaacattttgaggtgcgattatgatagatcttaattcaacacaaaggtctagtgacaacctatcaacagcgagtggggcagctaatttaaaagctgaattaaatgactcgaagctagttaaaggcacggaacttgctggtagggagccagtagatatagatacggcagccaaagctgagcaaaaagataaaaaagatctgattgctgaagttaagcaaaatctagaaaagttaaatgattacataccagtaacgtcaactaatttaatttttgaatttgatgaacttggtgatccacccatcataaaagtactggataaagaaaacgatgaagtgatccgagagatcccgacagaagagtttcgagaagttgctaaagctttggaagaatttgccgataaactaaccaataaaggtttgttgttcaatagaaccgcttagcagtattagaatttgggagtattattatgccattaatcacatccgcaggggttggctctggattagatcttgaaagtattatcagtgcgactcttgatgctgagaatacccctaaattagctgcgtttgcaaaaaaagaagaaacgttacaggttgagctatcttcgttaggagaagtaaaatctgcaatgtctaaactgcaagacaccatagaaaaactagcagatatcgataacttcaataagcgtattgccaatattcaacaaccggcaagtgatgacggtgatcttatttcagttacacctacatcaaaaattactccaggtgactttaaaattgaagtactggagcttgcacaaggtagtcgcgttacatctaatgatggtttatttacctcaactgatgacgttgtcagtgcgtcaggcggaacgttgtcgtttgctgcgggtgacaaaagctttgacctaactctagaagctggcgctacacttgcagatttacgtgatgcaataaatgattctgaagacaactttggtgtgaccgcgaatatcgtgaataccggcacagaatcaaaacttgtactcacttcatcggtaagtggtacaggtaatgaccttgtaatcacaaacgataatgccgaacttgataaggtttcgacactggcaaatgatggggtcactgcaggcggaatggctattgcagccggaagcgaagcctctagtgcgatgatcaaagtggatggtattaccatcacaaatgatacaaacaccttcaaagacgctgttcaagatatgacaattgtagcgaaacgccaaagcgttgacggagaaaccgcaaaactatctgttgcagttgatagaaacagtgttaccaaattggttgatgaacttataactaattacaacaacttaattggccaaattggtttgcaaacacgtgttggtaaaccgttaaatgcagattcgacaattcgctcatttgattcacaattatcaagcacattagctacaaagctaactgatgcaggtccctttacaagtatttttgatattggcctgacagtcaacaaggatggataccttgaaaagtctagtcttgtccgtagcttaaatgaagcaatggatgaaaattatgacgatattggcaaggcttttgcaggtgaaaacggaattgctaagcaattagaatcacttctagataattatgttgattctaaaggtataatgaagcaacgtgaggattcgttaaattcgcaactagacgaattagaagatgatgttataaatcatgagtttcgaatggaatcactggaagcgcgtttaagaaagcagtattcgggcttagatgttttgcttgcgcaaatgcaatctactcaaacgtatttaagtgcccagctttcaagcttaccaggcttttcgaaacctaaataagcgaatttaaatttattatttaagaccaaaggtgaactatgtataacgccagagtaaaaaactatcaaaaagaagcgctaaagacgcgagtcgccggcgcagacagatacgaaattattcagatgcttatgtcaggtgcaattgaaaagatggtcttagcaaaagtagcaatcgacaagaagcacttagaagctaaaagcgagcatttatctaaagcatccgcaattttagaagcgcttagaggctgtttagattttgaagtaggcggtgaggttactgaaaatctatacgctctgtattcttatatgatcgatcgtctaattgatgcaagcgttaaaaatgacactagtatcattgatgaagtttctggtttattaaaagagattaaatcagcatgggatgcaattcctgttgatatacgcaatcaaacctttgctgaaaatagtgctcatgcaagctaaattagagcaaattgagttaactctatctgaactagaaaaacacttaaatgagctagatattaatgaatctagctcttgtattcagcagcttaccactagcttagagtctattttcgattcggaagaccctctcactgaacagcaaaaagaagtgctcacttctattaactctcgtttgataaagctctgtaaagacacagctgaaaagaaagagcaaactaagcaagaattatctacacttgtaaaaaataaaaaaaaggttgggatctataaccaactgaaataggcatatttttatgaccctcccagaaaattttaacgaagaatttaagcaactcgagcaaaaattagctgaagctcaagcacatgagctacgagagcaaaagtttgctattgaagctaatgaacgattttctaaaaacctcgcagcctttgaacaatactacccagatgtatttaaagcgattcaggagtttcaaccgagagaagatttttgtcttcatgtgactaagtctggtcatggcaattttgtgccaaaaggaaaagaagctccgctatatggtgaagatccatatcagcaagtcaatacacaagtgaatacggcactcacgaacccaaccattgctaaaactgaatatacaaaagtagacttattaaacttcgatgaacgtttgcatattcaatacatgcaaaaattagtcgaatatatcaggaagataggtttatatgagcaatcagatagcttaagtgagattaagggatcatttccttctgcaatgatttttggtttagggttaggttatgctgttgaaagcttgatagagcgtgttgagttttcttatatatttatcattgaaccagattttgaagtcttctttgctagtttattttgcatagactggtctaagttaattcaaagggttgatgatgcaaaagggtgcttatttttactgctaggagctagcgagcaggaattagcggaggatctcagtgctatcgcagaagatattggtgctttttgtatagtaaatagtttttgttttcagcactatcaagatgataaattatcaaaattggcgcagaaatttttctcagattattttcgttttcagttcggttttggtttctataatgatgcaattactggctttgcgcactctttgattcatgcgcaaaacaatgaaaattttttcaatcaagatttagataaaataaaacgaaatggaaccaaccctccagtattcatagtaggaaatggcccttctttagatgagtcaatagagtacattaagcgaaatcaagacaaagcaattatttttgcatgcgggactgcgcttggttcattagttaaggccggtgtaaatgcggattttcatgtattagtagagaggccgctgcgcaattatgaagctttgttagacatgctacctgttggcgagtataaaaaagttaatttattatctgttaatactgtttatccagatacagtcgatttatataagtggtcaggtttggctcttaaaggtaacgaagccggctctgactatattaatcttcagcactatattaagaataaaaaagggctgccatttataccgcattcaaatcctcttgtcgcaaatacagctttatcctttgctttgagctttggcttcaaggatatatatttatttggagttgataatgggagtgtcaatgaagggcttattcactcacaattaagtgtttataatgatttacataaaggtaagtttgattacgaagaattggatttagactcagattcagttattggaaacttcaataaattaattaagactaataccacatttaaggtgtctaatcatcaattagagctattaataagtttatttccaaaatgtgatgttaaaaatgttggagatgggttatcaatcaatggtgctactcctgttcacagtgatgagctaattgaactaggttatagtgttaataaaattgaagaagtagacttcgttaaaggcttattctcgcagataaatataccttcaaattcacatgttgagagaattaaaacagtttttgatgaaattataagtcacttaatatcaatagctagtgaaagtgtgctcaccgttaaagaggctgctgataacttgatgagacagtcaaggtatatatactcatataaagacactgttaatcgattttacttcaacattttaaaaggctcattattatatttccatacaccaatgcaatctgtgctctatagcttgaatgatgaagaaaataatatagagatttataatggcttaaataagatatggttatcttacttaagtgatataagaagtgactttccagtatcatgtaataaaaaatgtgactggagctttgcttctaagagtcctacgcttttgaaacaaggcaatcctttaaaagtgttacaagtatatagttctgcctatactgctgtagatgttttatatcaatatttatctaagcttgactcaagctttaaatttgtaggtcgaaatttagttgatgagccagttgcttctaggaagcttgttaaatcattttcatcgtctgaatgcatagaagcttatactgccgatcctctgatcagcgagttaggttttcagaaaaatgacattatcatttttaataatctgctatctgattttattggcaacgagaagggggttgtttttataagaaatcctgtgcttatgtatgctgaaatgaaaaaatactatatcaatagcaaagatttagagctagaaattactagcaagctaatgtcaatggttaaagcattcaaggataagaaatttaggtctataatttcaagtggtcaatctgctttagctaacttttgttcttattataactataaatttaatcttaccttgaagagcatggtggtaattaaatttgaagattttattctcaatccatcaatcattaatactgagatagcgaatttattagatgaagatatagttaaaacagcagaagaagaaattgtaagcctcaactcatacattgagaatgacaagttacttctcaaatatataacaaatgaagaaagagcagaaatagaagctaattgtcatgagttacttaacttatatgggtactaagattatctaaccaacgcctagacgttggttagataagctaatgtattattacacgtaatcaaaataagcttggtaagcttggcactcttcagaaagcttttcagcttgttggatatctttttgaacaatatgcctgtaaggcttgtcacgttttcttatttcacctttaaataattcctgttcaaatgtcctgttgtagatgtcaaaatttctatctacaacaccttccccttcaagttctagtagctggcaaagctcacttctgtaatcataagaatcaataaagtcttcgtatcgaatgattttagaacagctattcttttcgcaaaaacctaatatatactttgattctcttaagcaatattcgtaagaccaatcttcgtttaaaggcacattttgttgcctgtgtttctcaactaaacttaaataaatatctttaatatttctgcatgttacaacgattttttcaggaaagataagcttgttaacttgagagtgtatgtcagactttacttcttttattcctattttgtagtttttttcttttaatgattttaacgtttcaggcaatgagctagggtcattttgtaaagaaaagtcggttaattgatttattaaattaacattaaagcgattattttctgatacattaggttcgacaaacataaactgtttggcatcaggctttgtaaagtaattagcgattaatgtgcttcctgaacgccccattgatgcaaagtagatgtacacttcaaattgattcatttaggaagcctcaataatgtagctgtgatgtctttatggtcttttgtaaaagcgtaaccatggtctataagccattgttgagcctctaattgttcatcttttggtagattataatattcaaagtttataatcattggctttatttttttaattggaaatgaagataacacttgccaatcgtggccttccgtatctatctgaagtaaatctaattctgagatgttatattcagaaattaagctttcaagtgtgacacaatcaacttcttcagagaccatatatttttgtattagcgagagggtttcattgtctacttgctttccccctaatgcatttctgtctgtatatatagatgaaattcctaatgcccattcaggtaagatttcattttctattacatctctggggatcctattgagtatgattttttcttcatcatgaattgcagcattgatgagtgttaattgatcataagctcggtaattttctaccaataagtcaaacatctctttatttggctctaatagaattccttttaaatttttcgcttttatatgcttgtgaagggggtcgaatcgtttaccatccatagcacccacttgaataaactcaaagcgcttaccagagccacctttaatgctgtaaagtctatctattaatatattgaggtccagaataatgtctggccaagtatagtcatcaattgatgttcctgtaggcaaaatatcaaacctctcttcattagctatattgtttttacgtgaagatactagcctattactaaagttaggttttttcttcttagtttgcgtgcgtgactcttgataatggattatgtgcggcgcagaaatacagtttttttgatcgaatatataagtgtaactattcggtaaccaacaagtgatcagtggcgaagaagtcgaaacttcacaccaagcctgatctaataacatttgatcccatatcaagggctttattttgcttaaaaaggtccagttttctaataactcaatggcgttttcggtgtaattgaaaaaaagagttccactggcgaattcccagtcatcgtataaatgaacaccaaagtctacataatgagggatcaatggagctctttttacttttgcatctgcgtcaacccaaagaacggggcctttagtttcttttaatgtgtttaaaatgaattcaggctttaaactgcaattgacttcccaatcacccgcggagtcaacaccatgtattaggtaattatcgtacccaatagtatcaagtgaacttttaagttccattgcacagtcttgataacttgtatttttagtgtagtagctgattacttttggttttaaacctttgtcaaaaaatcgactgctttttgcaccaacccatatgttctcaccaaaattagaacttacaataggtaagaattttgcttttagttcattttttaattcgtgatttcttaagataagggtgtcgtgctcatcatattcacttttaatgctatctattaatttgtctaaactcatctcattattcacttatagagatacttaatgattttatattttttggaatttgattcttaattgcatcagcagatgttatagagcaaatgattattaaatctggatgctctttatacgcctctagcggtgtcattatagtcttagtaagtgacgaagcatgtttatcaggattagagtcgatgaagaagtagttatcaccaatgtactctttcaaggaactctctaaatggtttgataaagctgaaattccccaaaaagctactttctttggttgaataagttttatttttttaatcaaattaatgtcgataattcttagaacttgatcaacttgatgagagtctacccgagaattaagtagtttcagtttttctgaaagatcgaataaaccaaacctgcgagagttcaatatgttagcaatcgtaagcttattcttttctatatttgctccatcaagcgcaagaatacagcggtttatgctatcacccaagtcaataatttctgcaagttctgtccataagaatggagcgttattatcacggccatttttaagttcatgataaattgcctcactcgcttctagaactttatttttggcaagtgttaagtgatagtggcttttctctttcaatcctcttgataataaaattagtgctaaatataagcttgattgagcagttttggttactaatagtgagcaaaacttctcaattctatagccttcaagaatgcaaaattgtttttcagcttctgcaaagttacctgtgctatagaagtaacttccgagagagaagcgcagtgaaattagccaccttaatgtaaagccagaaggttttgccttttcagcttcatcaagtaaggccaagctgtcatcgagccatttttgggtatgttcatcttctgcatagcttataatagtgttaagtagcaatctgttttgcaaagaggtatcgctattaaggagttcgagcgcataagaagatcttaattttttgtcttcaatacgttggccaacttgaacaacctgtctatgcagccaaggagagtccataccgttcgcaaagtcaatatacgaaggtaagttgttacttgagtattggggattctcgtagcttaaatcactattgatttttgcccacattggattcgttaaatttggcgtcgcaacaacgataatccattcagtttcaaattcgccttggctaggtgatagttcgctataggttcttgcagcatcaaggagtttaaatccgccaggcgcggtttgtgcgaatcttttttcaatcatgaacccatagctttcaataagcgttttaaacttattccaatcaaattcatgaaaatggaacgggttagggtctttacctgtctcatccacccataaatatggaacgctaaggactaagcgaccatcaggttttaaattggtagtgcaaaatttaaaaaagttctcatagtttctaagatgctcaatcgtttcaaaagacgttatggtatctacgcgaggagtatttaatttatcgagtagatctaaatcatattgttgataagataattcactattgccataaatagtattcgaataattgacgctatcttggcaaatatctaagccataaacacgttgtgcttttgataagtttgaaagtaaatagccaccatagcctaaccctgaagcgcaatcgatgacagtatcgccttctcgtataaagttacatgcccatacataacggtaggtgtgggcatctgagcgggcgccagactccctaagcatgtccatatgcaagtcgcggttctctttcaaccatattaacgagtcttgcgtgtcttgagtgtttcctaaaaatcgaaaactacctaaagtaaacttctgattatcataaagcttatcgtaagtgtaataatgatagtcgatataacttcttacaaaaccatgttcaaataattcattctcaatttcttctttcgcagtatttaagtgctcatttaccaacgtaagtattagttcttgttgaaagtctaaagcatggatctctgctataagaaggcttaagtcttttatgtcagatataatatgtgacttcaaactacagtctaactccgccaagctcttgctaactcgccaatctaaagtttgctccggatgaaatataaactttcttttttctaattcattcttgaagttcagcatttaattataactccgttacttatattcagattttcaatgtgcttttggatttcatctaagaatgattcagatgctaccacgacaggtaaattcaagttagatgcttgagtagggcttataacgttaaagcctcgtttgctataatttccaaattctgcttttttatcaactaagtgaacgattcttatactaagggactttagtagcaactcaagttcatcaaaaaactctcctgcaccatagacaacaacttctgttaatttcagctcttttaactgttcgtggattgtcattatagattcttggtgtttgccttcagtttcattgtgaaaaaaaacattttttgacaaaaagagaggatcaagtcgagttattaaaccttgaggccaagtaacacgcttagataaaagtcctttgaatgttaagtgattactccaaaattcattcaaaccaatatttcttatttcatcgatctcattttgttcgataattgaatattggctttctgaaccaaaattatcttcatgcttcaggttacctaaaaactttgcttcaatttcagttggaaatctaacttggcgtgcaatagaagtaaccgccgccagtctgttgttgtaagtatgttcatttaaatttaatgatttactgaagtataagtagctgtcaacgccaaaattaaatgcagtgactagctgcttgtgtttttccggtgaggtatcttttgcgcaaataggcatcactttttcattttcaatagtaaaatctaaagtagttgtgtttttgccgactaaaaaatactccactatttctgggcttcgagaaatagccattacatcagtaaaagtagatgtaacgaaaggcagaaacgacatgaaaattaattcattagcatggttgtaagctcgttccgttgtataaaaaagaatattgagttttgcggactttgttgtcgatttttcaatctgatggttaatagtgccacctgcgccaaagtctacaaaagcatagtcttcattttttgtgacttgctcaatatacaagtctaacagagtctgtttttgctttattgatagtgtaagctgctcacgatgcttttctaagaatgcattaataagttgaactttaaccttatcatttgaaattttattaacttcctcatcaagaattgattgtaaagagtcatctttctcataaggaagttggaggtcggtaagtagattcttaacacaataattttttcttgtaagaacttgagatatgtcacgactcaattcttttggatctattgatggtaagtaggttgcttttcgagaagcataaaactttcttgttgaaaatacccccgcttcctgaaagaaaaaatcaaaaacatgcttatatatttcaccctcacgcatcagaaatagggggtgacttatttcattatgctcacattgatctttaatccatttggcaaatcctgccaacgttgggccatgtattacggcgccaataaggaatgctagtttttcttcgaacgataagaagctaggagcgagcattgctgcgaaaattcgagcttgattaatctcgttaggatagaaatctttgaagattttctctcgtgataagacacgctgaatccatcgtggcggagcaaaatgtagcgactttatttttgcagctgaagcatttattacatctgattttaagttatcgcctatgtgaattatttgctcttgcgaaatattaagttggtccaataaatgtgaatacatatcaccgcttgcttttgttaagcgagtttcacttgaaacaaaaatatgagtgaagttaacttctggaaaattggttctgagtagttttgataaaaacgaattacttaaatacatatctgatgtagcaataaattcgacattgtatttaaacaaatgttggataacttctttacagatagggtcagggtataaatattttgcttcaacttcatgctcaatttcgattaatgataattgaactgattccgtataaggtgagcatgcataaatttctggtagagtgatatcttgataggggctttgtaatcgggcttttttttcgaagaaaattctactatttctgaatgtttcaggatcagattttattggtatatttcgttcgatagctgtttttgcaaccaacgtaaatatatcagttggagcgccgcacttacgtcttaataaagtgtcaaaaatatcaaaagatgcgaccttaacctctttatttttaaagataagatcaatttcagcgcttatttcgctatttaaatataaatcgtgtaaattcatcagaagcctatttcttactgaatcgtgttaataatcgctttgatgccatctagagctgtttttaactcatcaatttttgcagcatttagtgcgttgatactttctttcactgcggttgatgagatattttcagtcctaggcaggtaaataacttcgcaatacgatttcaattcgtcaaatttaccttgccagtcattcccaattgcgaaaacatcaacattatacttctgaatatcctgtactttttgtttccagctatgttctgggattacacagtcaacatattcaagtgcagctactatatcggcacgatcctgatatttataaatactttgtttgcctttttctaaattaaattcatcagtagatacgccgacgataagacgatctcccataccttttagtttcttcagtaagttgagatggcctatatgaaaaagatcaaaggtgccgtatgtaagtattgttttcattaattaactctcaaatactgttgcactttttatcatacttaaattccagtcttttttaggggtttgccaatcgtcaccgtaatgtgttgctaagtaacttgtcgcattagagggtaagttgagagtgatattattaaactggtatttttctgtagttaaaaggtgtgaactcggcatagtaaagcctcgcgatgaaataacataatgcattagctcctcatcaacgtatttaataaaaacgtcaagttgtgcaagtttacgctgagctttgattggtcttaacttaaatgaagcgcaatcacctttatggatactgttatagtcattacgcgctttatttataaagagctcccaaggtgtattaaattctagctctagtctttcaagcagggaggtaattgattgaaaacacttatctgtgtctgtgctatttatggctatatctaagtcatcatcccatgggataagcgcattatctcgaactataccgagcaaagttcctgcatcgacataatatgcgacattatctttgtttaatgtctctgtcactatcgcaagtaacttaagagcattttggtttgcttctgtattacctagctgaattcctttgattgcatgtgcagggaggatacgtattttatttacattaattgctaattcagtttgtagttggcgttcaatttgttcaaaaaactcgctggcgacataaatataatcaaattgcatttttagcaattcttctggcgcatgcactgttaaacctgccagtttattagcctgtttggttgtgtcattatcaacaaagcccagtacctggaagtcattttgcaggtatttcaaagcggccttaccggcttcacctgcaccaaaaataaaaatagcgtgcgacataatataattctttggtatttatagtttttttgtaagcaaattatagaccataataaagtggtcatttagcctaatggttctggttgtggacacgtttctctattaagcttgccacacgacgtgataaagtgactttaatttaagctaatttataactttttcaataagttaatataggcattcagtatgatagcaatctatgcaaatgcaagccagcaaattggctatgggcatgtaatgcgacaaatagcgttgatcgaagtgctgcttaacaaccagcataaggtcacacttttttaccgtgatttagcccctcaattgcatgataaactcagcgggatgggggtggttttaaagtgtgctgtagatgaaatcgctcttgtaaccatgctatcaaaagccgatattttaattgtcgatgattatgctctatcaaacgaaacaataattcagttaaaaaacaccgtaaaacaacttgttatatttgatgatggcacgtatcaggagccattagaatttgatttaatcgtcaatcctagcgatgtagtcgatacaattcataaagcgcctagggtgttacaaggtttagattatcggctaatacgaagtgagtttaaatcgtatagggcgcgcgaacgctttattgaaaagagtatcttcattagtttaggtggtacggatgtcaaaatgttgactcccgagctttgccaacaacttgttgctagtaatgatattacaaagctcgttgttgcagtgagtagtagttgttcagaaaatacacttactttgctcaacaggttaaagcaacatgctaagtttgaattacatattgattatccaaatctcgctagattaatgagtgaagctgatattgctattacgtcagcaggggggagtttgtacgaattaatgtatttaggcgtaccaacgattgctttagttttggttgataaccaatctcaagcattagactcaacactaaacaatgcggcttatcaatgcatagattttagaaataagcagcctgactttgctaatgtggtaaaacaggctctatttttgcttaattcagccgataaaaagagaaagttgtcactttatggccaacaggcaattgatggcatggcagcagagcgcattattgaagcgctagattaatcaaataatggtcgaagtaatataatgaaaaaatttgatgttgggcaattgcacaagagtatcaatattgatggtgtcgatattggtgaaaattatcaaccttacacgattgccgaactttcaggaaatcacggtggcgatattaataaagcacttgaactaattgatgcagcagcaaaaacgggtgcaagtgcaattaaaattcaaacatatcgtccagatacaattaccctggatcatgatggtcctgaatttgttgtgaaagataaattatggcagggtcgcaccttatatgaattatatgaggaagcacatacaccttggcattggcacgaggcattatttgcacgagctaaagagcatggcatcactttgttttcttcaccatttgataaaacagcaattgatttactcgaagatttaaattgccctgcatataaaatagcctcattcgaaattactgatattggtctgattcaatacgctgctaaaacgggtaagcctatcatcatgtcgacggggatggcgacgctcgctgagattgaagaagcagtcactgctgtgaaagaagcgggtggcacgcagttagctattcttcattgcgtgagtgggtatcctactccaattgctgattgtaatctttcaaccttggcctatttacatcagtatttagatatacctgtgggtttaagtgatcacagtttggcggatactgctgcgattgcctctgttgccttaggtggcagtattattgaaaagcacttcaaaatggcgaacgatacaacaagtgtcgatgccgctttttcattagatccaaatgatttttctcgtatggtgtctgcggttaaaaataccaaaagcgcactgggtgagcctagttttagactggcaaaaagcgagcaagataatgttgtatttcgtcgttcactttatattgcagaagatatcaaagagggcgagttatttaccgaacaaaacctgcgttctgtacgtcctggcttgggattgcatccgcgttatttagatgaattaattggtaaacctgcgaaacaagcgttaacgaaaggaacaccgatgaaactagagtacgtaacacaatgaagattgtagcctgctcacaagcgcgacttgattcaacacggttacctggaaaagtattgctacaggttggggggaagtcgttacttgactaccacatcagccgtgttgctcaagctacaaaattggttgagcatgttattgcgaccagcgagaatgaaaatgacaataagatagtcgcattttgcgagcaacgaggcgttagagttattagaggcagcaaagataatgtactgcttcgtttcaacgcagtggcagatgaattagcattagataacgaggaccgtattattcgtttgacggctgattgcccattagttgatggcaaattgattgatgagttagttagtagtcacttagcgcaaggtgatgactatacaagtcttaatacgggcaatcttattcgtggatttgacgcagaaattatgtcagttgcagcacttaggtatgcagctaaacaagctactaaggactatgagcgtgagcacgttacaccgtacatctatcagcatcctgagttattcaaatgtggtcactttaaagcgttgactaatatcagtagtgctgcgaggttatgtattgatgagcctgccgattttacaatgtttgaagcgctagttgctgcctaccctgatgatcttctgtgtgcaagcagtcgagatataatggcttttttagcacagcatccagctatttcgcagcttaatttacatgtacatcaaaagcgcttaggtgaataatatgcacatcgcaaattatgctgttacattaaagcgggtaaccgaacaagattgtgagcgtgtatggcagtggcgcaacatgccacatgtgcgtctgcaaatgaccaaccaacaatctatcccatgggatgatcaccaaatttggtttaagaatatgttggttgataattgccaacgtcattttgttatttactacaaagagcaaccaataggcgtgattaatgttaagtcagatcagccgattgaaaacgccaaccgcgctgaaattggtatttatatcagtgacactcattttttgagtaatttaattgcctttgcgccttcgcttgcattgattgattatctttttaatgagttaaatgttaaagagttatattcagaagtaaggcgagaaaatacagcggcaatccgctataatcaacaacttggctaccaattggcagaccacccaacaaaccaggcgttagtcagtatttcgttaactcatgacgactattttcatgcaacgcctaaacttaagtcatttttaaaccgaggttaatgtgtcacttaataaactgacagatgcgtttgttagcgtattagaaatcgaacaagacgaagtatgtgaccagttaagctattcagagcatcccaaatgggactctatgagccatatgatgctggtggcagaattagaagcgcaatttgatattatgcttgatacggatgatattattgatatgagttcgtttttaaaagccaaacaaattctatcaaaatatggggtgtcatttgacgagtaatagcagccgagtattgatcactggtggtagcagcggtattggctttgcggtggcaaagcgactgctagaggatgactcaaaactattattggtagcgcgggacgaacaacgtttacaagcagcgcagcaagcgcttaaagcggattatccagatgcagatgttgttgtttttgttgccgacacgtctgttcctgctgaaataaagaaaatatttgcttatttgcagcaacaaaaatgttcattgtcagggcttgtccattgcgcgggaagtatgcttgaagcgccattgatgatggtacgagaagagcaaattgatgagcaatacgctgtccatttaaaatctgcactaatgctttgtcaaagcgccagtaaaatgatgcttagagcgaaacagggcagtttagtcctggtaagctctgttgtggctgaacaaggaagtagtgggcaagttgtttatgcaagtatgaagtcagcgatgagcggattggttaaaagtcttgctcaagagctcggtacatttaatattcgcgtcaacagtgtaagtccgggcgtaatagacactcctttgcttgctcactacgatgatgaaaaaaagcagcaactagcagaaaagtcagcactaaaacgcttaggcgcggcaagcgaagtcgctaatttagttcgttttttattagctgatgaaagtcgctatattacagcacaaaatatcgctgttgatggtggtttaaggttgtaatatgcatggtgagttttggcaattagataataaaaaccctgaggcaaagctttattacaaagaccattgcatagattacaatgagctagaagctcaagtgcagcaggccgtaaactcattgccatctgagcgctgtttaattgctttagttgcgcaatcaacactcgactttgtcattttttacttagcagctcttagacaatctcatgttgtgttattagttgatgcaggcctcgctgaaaacgacataaatgagctactagagcactatcaagttaatctgcttattgaaggaaataaaattcactcattaagtaattacacacatcaattagctgatgaactatgtttgttactatcaaccagtggttcaacgggctcccctaagttggtaaagttaagtaaagctaatttggctgcaaactgcgcttcaataaatcagtttttaccgatacttaaagatgatgtggtaatgacctttttaccgttatcctattcgtttggtttgtctattttgcatacccatttagcaatgggtgcgagtattgtgctgcaatcagatagccctatgtcggctgatttttggcataattttgagcactataaggtgaccagcttttatggtgtaccactgagttatcaattacttaatagactgggccttgaaaaaatgccgcttggcaatgttcgttacatggcacaagctggtggtaagttactcgcacgtgattggcaattattaagtgattacacgcacaacaatgacattgatttttttgttatgtatggtcaaaccgaagcaacagcgcgcatagcctatttacccgcagagtattttagtcgtcaaattggttttattggtaaagagatccccggtgttgagctacagcttcttgactcagaaggtgaacgagttgagcagtttgatagccaaggtgagctgtgtgttcgtggtggcaatatatttggcggttatagtgaaacactggcagagctgggctatttcgaagatatttctttgctccataccggcgatattgcaatacaatcgccatcgggtttatatcaaattgtcgggcgctctaagcgcatctgtaaaatagctgggcgtcggattaatcttgatgaattgcaatcgtggctcgacgctttgtgccaatttgaagtggtctgtgttggtagtgaagatgaaatagttgtttattcagagcaacctatcgaagcggaactaataaaacaattagccgctaagcttaagtgccatagtcgtttaatacaaacagtcgtgctcgaagcgatcccaagactaagtaactctaaggtggactataatgcacttaagcaatgagcaactcctcgagttgccaatttatggcttaaacaaagcgcaaaagcaggcgtttcttgcatcgcaattaagctttttagataactaccaccttcagcactgtgccttgtatcagcgcttgcaacaaggctgtgagcaagtatcgcctttgacagtaccattatttaaagagtttttgttaaccagtattacagccgaggatcagcatcgtttgctaacctcatcaggcacgcaaggacctacctctaaaataacgttagattctgaaactgcgcagttacaaagccggattttaacgaaaaccttacagcattggctaggcaagcaacggcttccaatgcttgttattgatgcaaaggcaaccatacaaaagaaagctggtatgtccgcccgcgcagctggtattcaaggcatgttgttttttggccgcgatccacattttgcattaaacgatgacatgacattaaatattgaagtcattgagcaattttttgagaagtataaagacaccccagtttttatgtttggctttacttttattgtttggcaacagtttattcaacagctggtgcaaatggggaaacgctattcgttttcaaaaggcatgctacttcatggtggtggctggaaaaaaatgcagcaatcagcggtaagcaatgatgtgtttaagcagcaaatagcccaatctcttggtgctattagcgtgcatgattattacggtatggttgaacaaactggtaccatttatattgagtgtgaacatggtcatttacacgcacctgtttggtcagacataactgttgttgatgcagccactgctgagcctcttggtaataatcaagcgggcgtgattcttcttaattcggttttaccaaagagttaccctggtcatcgattattgaccgaggatttaggagtgatccatggtgaagatgattgtgcttgtggtcgcttaggtaaatatttttcagtgcttggccgtttggcgaagtcgcaggtgaggggttgcagtgatacctttagttgatgatcctcaagtagagtttttatttggtaaccccactaacttgagctgtttagacacggcatttagtgacgatgtcataaatgaaataactgctttttcaacttttcttttaaaagcacagcactctaatgctcattcggcgttgggcttttggtgccgtaaaagtaacatactggcaatgaagagcgattttaaaagctttgctcactcatcaccgaaagggcttatctttcatattaccccggcaaatgtagataccgtttatttttacagcttaatccttagtattctgtgtggtaacagcaacatagtgcgcattagtgatcgaagtggggatgaagcatataagctaattgattctctaaagcgctttttaagtcagcgtcctcaatcagtattacatgctttaatttgcattgtttcttacccaagttcagctgaagagctaacacgatattttagtgaactatgtgatatgcgggtaatttggggcggtgatgacgcaattgctaaaattaaccagctatcacccgtaacaaaccagatttgctttccggatcgcttctccattgccgtgttacaccttgaaagtgaagctgaaatagaagatgctgctatacgctttacacgtgattatgtacctttctcacaacaagcttgctcttctataaaagcggttttgtggcataaaacaagcaaatctatacaagcattattctggcagtctttaaaggataaagtgcagtacaatgatgaagcattttcacaaaccgctcaatataatcgtttatataactttcagcgattattattgatgcatcaatttagtgtcgaaaacacttataaatctgttgcgggtttaatttgtgaagctgcaccttttgatttagctattttagctgaacacaaaggcgatggactcttactaagctttgaagtagaaaattttgattttgcaacacatgcaaaattacaaacagtctcttgttttggcttaaccacttcagagcttgaaaagttatcttcccaagcgcttagaataacacctctcggttcagcgttaacgttcaattacctgtgggatggcgaaaatctattaatggcgttttcaaattaattgctgataggttttaagcacagcctgcttaatataatcaatgtcttgtgatgacaaagctggatgcaatggaattgtcattgcttgttggtaatactgcatgctttgcgagaagtcacacttattaaacccaagttcttggtagtaaggctgtaaaaaaatcggaatgtagtgaaggtgagcttgaacaccttgctctcttagccgtgtaaccatctgagcttgttgttgctgggtcgtaaagttgatttttaagatatataaatgataactgctgtaacactctgacttttgttttagcggctcaagcccctgacttgtaaagtacttatcaaaatcttcagctatttggtttctaatagaaataaagttatctaattgttttaactggctaagccctaatgcggcttgcaattcagtcattctataattaaaaccaagttcaatttgttgataataccaagggccgtgacttggctcggtcatttcatcaggatgatttgtaatgccatgactacgtaagcgtttcatctttttatcaagcgcttcacagttggtaacagccatacccccttcagcagatgtgattatcttaactggatgaaagctaaaaacagtgatgtcagagtaatcacaactgccaacagggttgcctttatacttggcgccaatagcatgagaggcatcttcaatcaccttaaagccatactctttggcaagttcattgattgctgccatatcgcatgactggcctgctaaatgaactgggatcacaactttagggagtcgctggttttgtttggctatcgctagtttttctttaagggcaacaacagacatattgcctgtctcaaggtcgatatcaacaaagtcgacacttgcgccacaatacagtgcgcagttacttgatgcgacgaatgagattggtgatgtccatacgatgtcaccaatacctacacctaaagctaggcaagcaatatgtaaggctgaagtagcactgttggtggcacaggcatggttagcaccgcaatattcagcaatggcactttcaaatgcgggtactttaggaccttgtgttaaccagtcagagtgcaagacatcaattacggcattaatgtcatcttgcgaaatactttgcttaccgtagggaattagcttatttgtcatgagaagtattacagtaaagcttgcacattgaagtttttaatttcttcaatgctcatataatcagggttatcaagtgagttatactcgaatccttgcgctacttttttacccttctcaccaatagcattaactgtaaaatcgttactacggctactaaatttaatgcccggtgcgataacaaaatgatcattgtattcgtacgtttcaaagcataagtcggccgggcacatgacttcatgtaacttttcacctgggcgaatgcctataaccttaattggtaagtcaggtgccatggctttggcaagatcagtaatacgaattgaagggatcttcggcacgaaaatctcaccacccagcatacgctcaaaattagttagaacaaaatcaacaccttgttgcaggcttatccaaaagcgggtcatttcttcatgagtaatcggaatatggtcacggccttggtcgataaacttttggaaaataggcactacagagccacgcgagcacactacgttaccgtatcttactactgaaaaggttgttttatggccgccagcaatattattagcggcaacaaatagtttgtctgatgcaagcttcgttgcgccatataagttgattggattcgctgctttatcagtcgacagtgcaatgactttttctacgttattatcaagggcagcatcaatgacgttttcagcaccattaatattggttttgatacattccattgggttgtattcagcggcaggtacttgttttaatgctgctgcgtgaatcacatagttcacgccgcgcatagcacggcgaagcctgtctttgtcacgtacatcaccaatgaaatagcgcatacaaggttggtcaaactcttgttgcatttcaaactgctttagttcgtcccgagagaagataatgatttttttaggtttaaagcgttctaataacgttttgacgtattttttaccgaatgaaccggtaccaccggtgattaaaatcgttttgttgtcgaacatagcgttacctaagttatttatcattggcgtttgatacgcaaaaagagaattttgactcaattctcagtaatttaactattaactaatacactagcaagtcagatgccaagttaatttatctaaaccatggtacaaagtacaaattttggcaaattaagctataatttaagcaatcggtttgtcggaggccgccatgaaaattcaatcacccaataccgggtttttaaatcaaactcagcaaacaggtaataagcttgctgagcaattagcgtcaggtaaaaaagtaaactcagcagcagatgatgccgctgcactgcaaattattgatagattaacatcgcagcaagatggttatagccaagctatcaacaatgcctacgatggtatttcttattcacaagttactgaatcaaacctatcaggtgtaaatgatgcagtatcacgcattagagagctgtctatccaagcgggtaacggtgcgctcacagatactgacagagcagcacttcaagaagaagtgtcacaattgcaaacgcaaatttcagaaacatttgaaaatgcgacatttgctggcaaacctttatttgatggtgagcaagtgtcgtttcaggttggtcctgatgccaacacgacgcaatcagtaacgccatctgatggcagtattgcttctgtgattgcgggtattgatatttctacccaagcaggtgcgcaagcggccattgatatcagcgatcaagcagctgaagagattaataatcagcgtgctgaacttggcgctttccaaaacactttagaaagtacgataaaagggttgggaaaccaacgggagaacattgctgcgagtcgaagccgcattgaagatactgattacgcaaaagcagtgtctgatcaagtagctaacgatattttgtcgcaagcttcaatcgctttacgtggtcaagcgaatcgttcagcagaatctatcctaggtttgctttaatactttagtcttgtttttaggcgttaagtgactattttttggcgttgatgtcaataaattgccgcttagcgcttgcatccctcctaaactcgcttacaatttaacattaacaaaccccgtggtaactgtggttcgccaataatgatcttaattttagacaataataataatcgtgcgataggtttacatgcttcactcaccttcattggtgaaacagcacaattagttgatgaaacaaatcttcaagcattttgtgaaaaacaccagcaacaagaatgtatggtcattttgggggctctacagcagcttaatcatgaagctgtgatcaaacagtttccagctattccatttttgttaataggtgaaaccctcaaaccccttcttagtattgctaatgttgtaggcttgatatgtgagcctttcaatcatgacgtaaccactcagttattgcatgactgtcagcaatatcagcgtatgctgcctggtgctcataaacagtctaagtcgcaaaaatcgtttgatggacttgttggtgaaactgatgctgtaaaagatgtgcgttttttaattgagcaggtggctaaaactgatgccaatgtacttattttaggtgagtctggcacaggtaaagaggtggtagcacgaaacgttcacctactatctaaacgaaatagcgggccatttgtgccagtaaactgtggtgctattcctggtgaattacttgaaagtgagttatttggtcacgaaaaaggggcgtttactggggcaatttcagcgcgaaaagggcgttttgaattagcacaaggcggtacactgtttttagatgaaattggtgacatgccactgcaaatgcaggttaagcttttacgagtattacaagagcgcagttatgaacgagtaggtgggacaaagcctattcaagctgatgtacgaattattgctgcaacacatcgtaatcttgaagaaatgattgaaaagggcgacttccgcgaagaccttttttatcgcttaaacgtgtttccaattgaaaacccttcgctaagtgagcgtgcagacgacattcctctacttttaaaagagttaatgcgccgtgtgaatgagcaaagtggcacaacagcaaaattcaccgaacgggcaattcaaagcttaaaagagcatgcatggccgggaaatatccgtgagctagccaacttagtggagcgcatggtcattatgttccctgataaagtggttgatgtgccagacctaccagctaaatatcgttacattgaggtcgaagcctatgagcctgagtaccctgaagagctgatggaacgagatgctttcaacgatatttttagcacaggctttagtgattacgaagacgaagagcttgatacgccagcaacaacggttgactctggtttattacccgatgaaggcattgagctgaaagagtatcttgctgagcttgaaatcagcttaattagccaagcattagagcgctatgactatgtcgtagcgcgtgcggctgaaatcttaggtgttcgccgtacaactctcgttgagaagatgaaaaagtataacctatcgcgagattaactcgcggtaggtttaacgctctctacataaagcatgtttctgcagatttgcggctaatattcactcactatttcggcttttctaaaacaatcattactgtgatcattcaccataccgcaggcctgcatgtgcgcatacacagtcgttgggcctaaaaacttaaaaccacgcttttttaaatctttggcaaatgctgtggaggctttagtaatagccgggtaatcctctagtttatctaggttgtttaccaaaggcttaccacctacaaactgccattggtagtttgagaaactaccaaactctttttgaatttcaataaaacgctgcgcgttattgatagtcgcggcgatcttggctcgattacgaataatgccatcaaactgcattaaccgctcgacgtcgtcctcagtcattttggcaacctcttcaacaacaaagtttttaaaggcgctgcgatagccatcacgctttttaagtatggtataccaactaagcccggcttgtgctgactctaaggttataaactcaaacaaacggtgatcatcatataatggcaccccccattcttggtcgtggtaggccacataatcttctttgctggtgtcgagccacgggcagcgacagtggtgttctttttgcattgttccctcgcaaatgtcatttttttgtcggtgtttatttttactttaatttattgaaataaaacaaaaataattgtggtatgaattgtgcatttagctgtgtagacacgattttttgagtatcgattatggccttggcacatgtattaaaaccacaatttatcacagctaatcaatataacccatgcttacagcaagaagagtatgttggcgagttgagtgagcttcgccagcaagctagttggctaagtcatttagtgcatactatgcctgcgggcgttgtggttttagatggtcgaggcatgattgcaaaagcaaatcaaattgctattgatatgctgggtgaaccgcttgaaggtgaaaaatggtttagcgttattcagcgctcatttcgaccaaagcaagatgatggtcatgaggtatcactcaaagatgggcgtttaataaagcttgatattactgcgcttgcacctgagccagggcagttaattttaatgacagatttaacagaaactaggcgtttacaaaagcgagtagcacatatgcagcgcttaagtgcgcttggtaaaatggttgcttcgcttgctcatcaggtcagaacgccgttgtcagccgccatgctttatgccgcaaacttgggttcaaagcgtttaccagaaagctcgcgtggtaattttcatactaaattaatgtcacgtttaaaagatttagaaacccaagtaaatgacatgctgttatttgcaaaaagtggcgaacagcaagttgttgaaagtgtctcgatgcaacagttactcaatgaagtaaaagcgggggcggatgcaatggtggcacaaaaccaaagtaccttagccgttaacttgccagaaccagacattgagattgtgggtaataaaaccgcacttgccagtgcgattcaaaacttaattcataacagtattcaaataattggcaaacatgcagaagtatcgcttagtgctgagcgcgacaccgcaaatgataatagtgttcgcatcagtgtaagtgacaacggtcctggcgtagatatgagtcaggccgagaaattatttgaacctttctttactacaaaaagccaaggcacaggacttggacttgctgttgtgagttcagtcgctaatgcgcaccaaggacgggttgaagtgactaataatgcccatgggggggcatgttttagcttgatcctgccaataagtgcagaatttacgtcagcggaggcaaaatgaatacgaacgcaattttagtcgttgaagacgacgcaggcttacgagaagctttgattgatacactcgaaatgtcaggaattgattgcatcgcagcagatagtgctgagcaagcaatggtgctgttaaaacaaggcacgtattcattagtggtcagcgatgtacaaatgggcgcgatgagtggccttgatttacttcgcagcattaagctcaactaccctgaactacctgtacttatgatgacagcttatgccaccattgatgatgcagttgaagcgatgcgtttaggtgcgattgattacatggcaaaaccatttgccccagaagtattgcttaatatggtcagtcgttatttacccgaaaaggaaaaagaaacagacgggccaattgttgcagatccatcgagtattaagttactcgaacttgcgagcaaagtagcgcgttcagatgccagtgttatggttcttggcccaagtggttcaggtaaagaagtgttagcccgctatattcatgataaatcgaatcgagcagatgctccctttgttgccattaactgtgccgctattcctgaaaatatgcttgaagcaaccttatttggttacgaaaaaggcgcgtttaccggtgccattcaggcctgccctggtaaatttgaacaagcacaaggcggtaccatcttacttgatgagatcaccgagatggatttaggtctgcaagcaaaattactgcgtgtactacaagagcgtgaagtagagcgcttaggtgggcgtaaaacgattgagcttgatgttcgtgtcttagctacgagtaaccgtgatttaaaagaagcggtgagtgaaaatctatttagagaagatttatattatcgcttaaatgtgttcccgctgatgtggaaaccattagcagaacgcccgggcgacattgttgtattggcagagcatttaattgagcgccattgcctgaaaagtaaagaacccattgctatgttgaccgagtcagctaagcaaaagctgctaacacatgcttggccgggtaatgtgcgagagcttgataatgttattcaacgtgcgctgatattatgtgatggtaacagcattcatgaagatgatgtcttcattgaagagttactaacggtagagataaagtcagttgctacgccaccgcataatgcaccggtgtatcaagagcaacccgttgaagttaatttagatacagtgccacaggtgagtgagcaaggtaattataaagacgagcttaaagacaaagagcatcgtattattttagaaaccctcgcacgctgtaatggtaagcgaaaagaggtggctgagaccttaggcattagcccccgcaccttgcgatataaactagcgcagatgcgcgatcttgggattgcactgccagcctaattctccttccaaaacagtgtcaaacaagctcacagcatgtgggcttgtttgctgtcaaaactctgacaagcaaagtaaatggtgtaagctattgaaaatgttggttttattttgtggcacggtttgtgctttatcagtttataagtaaactgtattgtcagagagtattatgaaagttcaaaacagcgcattatttcaagaaatgcaatctatggcccttgaagctagccgtagtaactcaattacaaatttaccaactcagacacagcctacatcaacggcacaatttggtgatctacttaccaatgcattagatacagtgaatggcttgcaacaagaagccaagcaaaaagtgacggctcttgaaatgggtgatcgcagtgtatcgcttgcagatgtgatgattgcttcacaaaaatcatcagttgcattcgaagcaacggtacaggttcgtaataaacttgttgaagcatataaagaaatcatgaacatgcctgtgtaactaggtagtggagaattatcgtggcgcaatctaatcaatcaactgatctagccctagcaggcggcggtatcgattctaccgatactgatgatcaacaagagcaaaagtcaggctacttaagtgccttaaacggtgtagatgttttacgccaggttactttagtgattgctttggcaatttgtttggctatcgcaatttttattatcatttgggcacgtcagccagatatgcgtccgcttggtaaaatgccaacggaagagcttattcaaacgctagactttttagacgcacaaaagattgattacgaactcgatggtaatgtcatctctgtagaagaaggtgagtaccaaaacattaagttattgatggctcgtgaaggccttgagcaagcgccaagctcaggtactgacatcatcatgcaagatatgggatttggtgtaagccaacgcctagaacgtgaacgtttaaaacatggtcgtgagcaacaacttgctcgcactatcgaagagctaaaaaatgttactcgcgccaaagtacttttagctattccaaaagaaaacgtatttgctcgtcgcgaaaaacaaccttcagctacagtggttttaacacttaaacgcggccgtacgcttgatggtgaagaagttgactcagtggttgatattgttgcctcagcggtacaaggtttatcgccagagcgtgttactgttaccgatcaaaatggtcgcttactaaactcaggctcacaaaactcactcgctgcacgctctcgtaaagagtatgaaatagagcgcaaacgtgaagaagagtacttaaataaaatcgacagcattctcattccagtggttggtttaggtaactacactgcacaagttgatttaaatatggactttagtgcagtagaagaaactcaaaaacgctataaccctgatttacctgcagtgcgaagcgaaacgactttcgaagaaaataacatcggtggccttgctgtaggtattcctggtgcgcttacaaatcagccacctgcaaactcaaatattcctgaaattgctggtcaaggcagtgcaggctcagcgactaaccctagccgttctcacaaagaagcaacacgcaactacgagttagataccacgatttctcataagcgtcagcaaacaggtgttattcgtcgtattagcgtatcagtcgctgttgattacgtaccagaagttggtgaaaacggtgaaacgactatggtgcctcgttctgtcgaagcattgtcaaatattcgtcgtttactacaaggtggtgtaggctttgatatgcaacgtggtgatgcacttgaagtggtcacagttccgtttgttcgtgaaaacacagaaatggcgattgaagtgccgctgtgggaacaagactggttcatgaaaatgcttcgcttagcgttaggtgccttggttattatcgtacttatcttggctgttgttaaaccaatgctgaaacgcttaatctacccagacgatacacttgaagagtatgatgaagatgcgttaagtgcgggtgtagatattggtgatagcacgctagatatgctaaataaagactttgactctgctgctgtaggattctcaagtgatggtacactacagctgccagatttacatggcgatgaagatttactcaaagcagttcgtgcattggttgctaatgaaccagaactgtcttctcaagtggtgaaagcgtggttaactgaagatgactgatcaagaacaaaaacaactaccaccggcgtttgatgttgataaattagacggtgtcgataaagcagctattttattgctgagtttatcggaagaagatgctgcgcaaattctaaaacatttagagcctaagcaagtacaaaaagtaggtatggcgatggcggcgctggatgatttatcacaagcgaaaattagcgctgttcacaacttgtttattgagcaaattcaaagcttcagcaccataggtttccaatctgaagactttatcaaaaaagcgcttacagcggcacttggtgaagataaggctgccagccttattgaccaaattgttatgggctctggcgccaaaggccttgattcactgaagtggatggactcaaaacaagtagcgaatattattcgtaatgagcacccgcagattcaaactattgttttatcgtatttagagcctgagcaatcagctgaaatcttgtcgcaatttcctgaaaaagtgcgcttagatttaaccatgcgtattgctaaccttgaagaagttcaaccagcagcactccaagaactaaacgaaatcatggagaaacagttcgcaggtcaagcaggtgcgcaagctgcgaaaatgggcggcttgaaagctgcggcagatatcatgaactacctagataccaatattgaaggtcagttgatggattcgatccgtgagcatgacgaagaaatgtcgcagcaaatccaagatctcatgtttgtatttgaaaacttaatggatgttgaagaccgaggcattcaagcaattcttcgtgaagtacaacaagatgtacttatgaaagcaattaaaggaacagatgaagcactgaaagagaagattttaagtaacatgtcgaaacgtgctgctgagctattagcagatgaccttgaggcgatgggacctgtgcgtattagtgaagttgaagctgcacaaaaagaaatcttgtcgacagcacgtcgtttagctgactcaggcgaaataatgcttggcggcggcggtggtgaggagttcctataaaccatgtctaaaccttctttacataaaggtcggccaattcaccctagtgaagcagtggatgaacttcttgaaaactggccaattcctgatgttgcacaagacaccagaaagttggctggacgttcaactgcctatggtacgcctttagctgacatgtaccgcaaggagcgtcaaaaacaagcggtagaagaacagcccgaagagccggaaattcctgctctgaccatggcagagcttgaaaaaattcgccaagatgcttacgaagaagggcttaagcaaggtcatgagcaaggctatattgatggctttgaaaaaggggctcatgaaggcaaagaagcaggcttcaaagaaggcgttgaactaggcaaagagcaaggccaagaagaaataaagccaattttagaagagcagttaaccacactgagaagtttgcttgatagcttatctcaaccattagcaaaagttgatgaaagtgcagagaagcagttggtgcagttagcggtcatgctaactgaggtattagtttaccaagaaattaaaacctcaccagaagtcatcttgcatgcattaaagcaggccattgacgcattaggcgaagaacaagcgaaagtacgtattcacttacatcctgatgacatagcattaattacacaaagttatggcgaacaaactattgcagataatcactggcagttagttgcagagccgaccttagaacgtggtggttgtgaaattaaaaccccgcagtcgtctttggatatgacagttaaaactcgcgtcaaagaaacgttggaaaactttttgcatagcagtggtatataacatttattaggctctttatgagtactcacgcaatgacccttagcgatcgcttaaaacgctacgaaaaacatatcaaagccccaaaaccagctgttgctggtattttgacgcgtgttgttggtttaacactcgaagcgaaagggctcagagcgccggttggcagtcaatgtaaaattgagacgataaatggctttgttgatgcagaagtggttggctttaacgaccaaactttgtatttaatgcccaatgaccatatttctggtgtactgcctggggcacgagtgatcccgcagatgaatgaaactggcttacctgtgggtatgagtttgcttgggcgtgtcgttgatggtcttggtcgtccactcgatggtttaggggcgattaatgctgagcaccatcttaaatttgctcaaaattccataaacccccttgcaagacgtccaattagccagcctatggatgtaggtgtacgggctatcaactctgttattaccgtaggtcaaggccagcgtatggggctatttgcaggctctggtgttggtaagtcagtgctacttgggatgatgacacgtggctctgaggctgatgtgattgtggtcggtttggtgggtgaacgtggccgcgaggtaaaagaatttattgaagagattttaggtgttgaaggtcgtaaacgttcagttgtagtagctgctccggccgatgcttcaccattaatgcgtttaaaaggttgcgaaagtgcagtaaccattgctgaatattttcgtgatcaaggtcttaacgtattgttgttactggactctgttacccgttatgccatggcacaacgtgaaatcgctttagcggttggcgagccgcctgcaaccaaaggttacccgccttcagtatttgctaaactgcctgcgctggtggagcgtgctggtaatggtggtgaagggcaaggtgcgattacggcatttttcaccgtgctcagtgagggcgatgatatgcaagacccaattgcagactctgcccgtgctattttagatggtcacattgttttatctcgggatttagcggacagtggtcattacccggctattgatatcgaaaaatcaatttcccgtgttatgccgcaagtggtctctgaagcgcatatgcaacaagcgcgagtgctcaagcaagtgtattcaatgtatcaacagaataaagacatgattacgttaggtgcatatcaaaaaggtaccgaccctatgctcgaccaagcaatcaatatgatgccgcgagtcaatcaattccttcagcaaggcatgaaagacgttattagttatgatgatggtctgcaaggtctagcgcagttattaggacaaggttaatggctaaaagtaaacttgatttattgttaaagcttgagagtgataaagaagagtctttacgcatggattacttaaaagcgcagcagcacttacaaagtaatcaacaaaaactgcaggggctgaataactttcgcatggagtattctcagcagttacatttgaaagggcgctcaggtttgtctagtgctgggtttagccaataccatgcctttattgccaaaatagaagaagcgattcgccagcaagcaagcactgttaacactgcaaagcaagttgttacgcagcgcaaagccttgtggttaaaacagcaagtgaaagcaaaagcggtggcaaagttaattgagaaacaagctgaaaagcaagcgatgctagtggcgaaagcggagcaaaaaatgttggacgaatttgcttcaaatcagttttatcaacgtcagcttaaaaacgcacttctctaaaatcctaacctttttaggcatgttaattgcatttacttaatcagaagcattaattttggcacttgcggcggcaaattgcctctttctttttaggtgaattatggcgatcagtgatatcaatttgcaggttaaaactgagcaaggtactggtttttctagcaaagagacggagtcttacgatacagcttcagggttgcgctttttaacgtcattaacagaagcaagtgaagcggcaaatgcccaaacaacctctcaatctaaaaatgacaacgagtattatcgtcttgaaaaaagtgaacaagagtctgaagagctgactgtcgatacagactatgaccacgaatcagccacagcagatgtaagcgatagcaaaaagaatacgagtgagactgtaacaaaagagcaagatgagtcacaaacagactcaagcctaaatgaagaaaactcattactttcgcaaattaatgcagcccaagcaatgagtacacgggttaataaacttattgaagataatgagttaggcgatgatgtaactgctaaaaagccagtctctggtgattctgttaccccaataattccatcaccaatgaactctatgtctgatgctgataagtctgctggcaattctgatatcaacaatactgctgcgagcgtattacataaatcaaaagttgcgacagctgtcgataatcagttaaaagctggtactgaaatagcgcagaaagatgcaaaaacgtctgatagtgatagcccattaatcgataaaaaactaactgtttctgcagctgatacgccaaatacagtgccgcaacagtccgaatcagctaaagagacaaaagcaaacctctcggaaaaaaatagccttaatagtctgttgaaggctacgggagaggctgatgctcaaaaaccaacatcagcacagctcgccgctcaaaataaccaagctagtgtcgccagttctgtggttgcagaagtcactaatgccaaaactgtttcctctactgagcaaaaccttgattcacctaaagttaaccaagggatcgaaaattctgtaacagataaatcaattatcagtttgtttgctaaggtgcaaagcggtgatggtaaagctgttagtgaatttgcaaaaggtttatcacttacccacgagcagcaacaacagcttgaacaacaaattaatcagttaaagacagatcacaagttagactcaaaagacgctgaaactattaaaaacttgcttacagaattgatgaacaaaactacgccgttgcaagtcacgcaaaatcaagcctcacaattaacggctgatgagtcgcaaatacagcaagatgttaagttatctgagcaaaaaacaagtgactttaaattgcctgtaggtgttgaaaagcaactggctgcattgacaaaagatgagcaacaagcgctgttgaacaaggttaatgcacaactacaaacagtcacagctggtactagccaatttgaaaagctaacagcagctaaggcttggctttcagaggctgttaacactaccgagaaaacaaatctaactacgccagttactacagccaatgcaagcgcggtagaaaatagtaatacaacacctacgcgagctgaaaagttagcccctgcggtaggtaacgtaaataattctgaagagtcatcagctgagcgagatattaagcttaatgctgaacgttcgcaggaggttagtaccccgcgagttactcagttattaaatcagttaacgtcgcctgtggcgacgtcgattcagccaactgcacatgatattgctcagcatcatcatgaaaatgcaatagatgcgcatattatgcagacgcaaacaactcagcaagcgcagagcaaatcggtgagtgtagatcctggggttatgcaagcgattaatatcattaaaagtgatgccgcgaaaatgcttcaggaacgagtcagtgctttgttaaatattaataataaagaagctgaaatccgtcttgatccgcctgaaatgggcagtatgcaaatacgtatccgcagtgacgcagagcaggcacaaataaactttgtagtacaaaaccagcaagctaaagaagcgcttgaacaatctatgccccgactacgcgaaatgcttgctcagcagggaatagagctaggtgaaagtagtattcagcagggtagccctgagcagcagcaggatggagagcctggtcaaggccagttagctggtaatcagcacaatgaagagcagcaacaagaggtaacagcacaaagtgcagaaacttctcgacaacaatcttcatcatcaatagattactatgcataagtcctgctattataagaaataaaatagttacaatgagtatatttcctaactgttgtaacgcttaaggaagtgacaatggccgaagaagcaaatttagaaatagaagatacaggtaaaggtaaaaagaagctcataattatcattgctgcggtcgttgtgatagtggctgctgcagcaggctactttttatttatgggtggtgaagaaccagtagaaagtcttgccgacgaaacaacggcagcagaagccgcggcaccttcaagttctgctgaaattggctctgctttgtatgttgctatgcctcgtccttttgttttcaatgtaccgggcgctagtcgtgaccgtattgtgcaaattaaagtgcagcttttagtgcgtggcgaagtaaatgaagaaacggctaaaaagcatattccactcattgaaagtaccttattaagcgtactgtcaacaacgacagcggatgagctaggtaccagtgaaggtaaagagtctgttcgtgttgcagcacttgaaaaagtgcaatctgctttaaatgatgtggaaggcagcaaagtgatcgagcgggtactgtttaccggctttgtgatgcaataaggggtcagcgtgagcgatttattatctcaagacgaaattgatgcgctcttacatggtgttgatgaagtcgatgaggaagatattcacgaaggtgatgacttagacagtaatacactgcaatatgatttttcttcacaagatcgtatcgtacgtggtcgaatgccgacgctggaaatcgtgaatgaacgttttgcgcgtcacatgcgcattagcttattcaatatgatgcgccgcaccgctgaagtctcgattaacggcgttcaaatgatcaaattcggtgaatatattcataccttatttgttcctacaagcttgaatatggtgcgttttcgtccgctaaaaggcacagggcttatcaccatggaagcacgcttggtgtttattttggttgataacttctttggtggtgatggtcgttaccatgccaaaattgaaggccgcgaatttaccccaacagaacgccgtatcgtgcaaatgctgcttaaaattatcttcgaagattataaagaagcatgggcgccggtaatggatgtgtcgtttgagtatttagactcagaagtaaacccagccatggccaatatcgttagcccaacagaagtggttgttatcagttcatttcacattgaacttgatggcggtggtggtgattttcacatcgccttgccttactcaatgcttgaacctatccgtgaattacttgatgccggtgtgcaatcagatacagaagatactgatttacgctggagtaaagcactgcgcgacgaaattatggatgttgaggttgacttatcaacacagcttctcgaaatagatttaacgctacagcagattatggagcttaaagcgggtgatattattccggttgaaatgccagagcatatcactgtgtttgttgaagagttaccgacatttagagcaaaaatgggccgctctagagataatgttgctctacaaattagcgaaaaaattaaacgccctgaatcagttaagtctgagcttcatgtgttcacaaaaggtggcaaaaaactggattcagatgcagaattagcagaactagaagaagatctacacctttctgatggtgtcgatttagactggtagtcgatttataaggttaaatataatgagtgatgatcaagatacaatggacgaatgggctgcggccttagccgaagctgaggaagccgaaaatgccacaagtgatgcttctgtggcagagcttgatgaattaaaagatgaaaggcatgagctttcaagtgacgaaaaacgaaagcttgataccatcttagacattccggtgactatttcgatggaggtcggtcgttcaaaaatcaatattcgtaacttattgcaattaaaccaaggttcagtagttgaacttgatcgggttgcaggtgaaccgcttgatgtgttggttaatggtacgctaattgcgcatggtgaagtggtcgttgtaaacgacaagtttggtattcgcttaacggatgtgattagccaagtagagcgtattaaaaagttacgatgaacgcacttatcgctttatcgagtgcgtcgagcaccgtgtttccaacggcatcaccgacggcagatcttctgtctatggtgatgtctttgcttttggtgttggttgttattattggattagccttttttgtaaaaaagcttaatccgaatctcgctaacagtgatgagtttaaagttgtccgaagtttaccgttaggctcacgtgagcgattaatggtgattgaaatagataacgctcaacacttaattggtgtgacgcctcacagtattaattacttacataagcttgaaacacccttaaaagaaaaagaattgccagaactagcaaaacgatttggcaaactattaaacccacaatcaccttctaataaaaagaattaacgctatgatcaagtggctcgttattttagcaagtgtgttgtttttaccttccgtcaatgcagaaggtgtcgaagcgctcactatcaccactaaccctgatggctcgcaagattactcggtaacgctgcaagtgttagcgatcatgactgcgctgagcttcattcctgccgcagtcatcatgatgacctcatttacacgtatcatagttgtacttgctattttgcgtcaggctattggtttacaacaaactccatcgaatcagatattgcttggtatgtcactgttcttaagtatttttataatggcgccaatttatcagcaggtaaacgaacgtgcaattgagccttatttaaatgaacaggttacttctacacaagcattggagcttgcaaaagagccaatgaaagcgtttatgctctcgcaagttcgcataaaagatttagaaaccttcgcaaaaattgctggctacgataaattagattcaccagaagataccccgctaattgttttaattcctgcgtttgttaccagcgaattgcaaacggcctttatcattggttttatgttttttatcccgtttttgatagttgatttagttgtcgcctcggtattaatggccatgggtatgatgatgctctcacctatgattgtatccttaccctttaagattatgctgtttgtgctagtagatggttggagccttgtgatgggcacactggcgaagagctttgggcttggggtgtagccatgcaattacaagcacataattaggtaggagagacaaaatggaaccagaaatttttgtcgatatactcagtgacgcgctgtttttagtcataaagttagtgtctgcaatcgtggtgccaggcttattagttggtcttgtagtggcagttttccaagcggcaacatcaatcaatgagcaaaccttaagctttttaccgcgtttgttaattaccataagtgcacttattatcgggggccattggtttactcaagagcttatggattactttacgcgtttagtgatgtcgataccggagattgcaggctaaatggagtttccatttgcagtcataattcaatggctcagtgattttctactgccgttggtccgtataagctcaatgatcatgattatggctggtcttggcgcgaaaaacgttcccacacgaattaaactaggtttagctattgtagtaacgtttgttgctgtacctatgttgccgcaggcaagctttaataatcttttctcatttgaaatgatattagtcgtgatacagcaaatgctgattggtgttgcgattggctttgcttcagtcttactgcttaatacctttgttcttgccggacaaatactagcaatgcaaaccggtcttggttttgcgtcggtcgttgacccgtcaaacggtatgaatgttccagcagtgggccagttttatctcattttggctactttgctgttctttgtgtttaacggtcatttgatgatgattcaaatggttattcatagctttgaggtattgccaatcgatggtaattggtgggcggtggatcattactgggatatcgttacttggggcggttggatgtttaccacagccttagtacttgccttggcaccactaacagctatgctggttattaacatgtcgtttggtgtaatgacccgtgcagcgccgcaacttaatatcttttccataggtttcccgtttactcttgttgctgggcttgtgattatttgggcaacgcttggtaactttatgactcagtttgagtttcagtggttaaaaatggttgagttaatgtgcagccttgttggttgtacaccttaggagcgagccatggctgaagattcaggtcaagaaaaaaccgaagaacccaccgggaaaaaaatagaagatgccaagaaaaaaggccaagtagcgcgctcaaaagagctcggcactatgtttgtacttattttctcagcaatttcgttactaatttatggtcctgaaatcggcaaaggtttgtacaacattatgggccgattattgagcctgaaccgcaatgaaacctacgacaccactaaaatgttctctgtgtggggaattgttgctgatgcgttgattttccctatggcgatgttcgtttttatcattgtcattgctggttttataggaaataccttgctaggcggatttaattttagctgggaagccgcagcaccaaaagcgagtaaaatgtcgcctgcgaaaggtattaaacgtatgcttggccctcaagctggcgtagagcttgttaaatccattttgaagtttgcagtggttgcaggctttgcggtgtttttaattaataccttttttgatgaaatacttcatttgagccaagaaagtgcacccagtaattttattcatgcgcttgagatcctctcttggatgtttttaggattgacctgcacgttgataatcatcgcagcgattgatgctccatatcaaagccacaagcatcataaagagctgaagatgaccctacaagaagtaaaagacgaatacaaaaactcagagggtgacccacaaattaaagcgcgtattcgccgtacgcagcgtgaaatgtcgcaaaggcgcatgatgcaagacgtccccgatgccgatgttattgttaccaacccgactcattactctgtggcgctaaaatatgatacagccaaagcgggtgcgcctattgtgcttgctaaaggggttgatgaacttgctatgcaaattcgtaaggttggtaaaggaaacgatgtgcctattgttgagtctccaatgcttactcgtgcgctttatcacaccaccgatgtaggccagcaaattccggatcagctgttcactgcagttgctcaggttctcgcttatgtattccagttaaaacgcttccaaaaagggcgtggtaaacggcctgttccactcgacaaaaagttaccgattccagatggttacaaatattaattcctagccttataacttggaatagttattgcaaattccgtgtagtgtcaattttttgaaattgttgaattatggaatttaaagcggtattacaacaacttaacagagataaaaaagaatatgctaagggtgtcggtacgccactgctggtacttgcagccttgggtatggttattttacccctgcctccatttcttttagatattcttttttcgtttaatatcgcgttagccctagtggtgttacttgttactgtgtacaccatgaaaccgcttgagtttggtatgttcccagcggtacttctgattgcaaccatcatgcgcttagcactgaatgtagccagtacccgtgtggtattgcttgaaggtcataatggtggggacgctgcaggtaaagtaatcgaggcctttggctcggtagttatcggtggtaactatgcggttggtttagtcgtcttccttattcttatcatcattaactttgtggttatcaccaaaggtgctggccgtatttctgaagtgtcagctcgtttcacccttgacgcaatgccaggtaaacaaatggcaattgatgctgacttaaacgctggttttattagtgctgagcaagcccgtgaacgccgtgaagaagtaactcgcgaagccgatttctatggctcgatggatggtgcgagtaaattcgtaaaaggtgatgcgattgctggtattgtcatcttggttattaacattgttggtggtttatttgttggtatgatccagcatgatcttacttttggtcgtgcaatggaagtttacactcttctaaccattggtgatggtcttgttgcgcaattaccttcgctattattatcaatcggcaccgcgattgttgtaacccgtcaaaatgaatcgcacaacatgggcgatcagtttaaaacgcaattgggtaatgaaaaatcgttattcattgcctctggtatcctaatcattatgggcttagtaccgggcatgccacatattgcatttttaagcttaggtgcattgttaggttatttagcgtattacacgcaacagcaaaaacttaaagctgcagctgagaaagcagaacaagaagctaatggcggtgcaccgggtacgggtgttgctaacaaacaagaacaaaaagaacttggctgggatgatgtacagcaagttgatgtgattggtttagaagtaggttatcgcttaattccactcgttgaccaatctcaaggtggtgaactgttaaatcgtatcaaaggtgtgcgtaagaagctgtctcaggaacttggcttcttggtgcctcctgtgcacattcgcgataacttagaacttgaccctaacgcttatagaatcacgatgatgggtgtttcaagcggcgagggcgagcttaagcatggcgatgagctcgcgatcaatcctggtcaagtatttggcccaatcaaaggcgtggctactaaagaccctgcatttggtttagatgcggtatggatcaaaccagatcaaaaagatgaagcgcaatcattaggctacaccgtagttgactcagcaactgttgttgcgactcatattagtcagttacttactaacagtgcagcgttactacttggccatgaagaagtgcaaaacttattagatatgttagcgaagagtcatcctcgtttggttgaaggactggttcctgacgtattaccactcacaacaatcgtaaaagtgctacaaaatttactaaacgaaggggtggcaattcgcgatatgcgctcaattgtacagacccttgttgaatatggcccacgtagccaagaccctgatgtattaacggctgcagtgcgaatttcactgcgcagactaatcgttcaagacgccgttggtatgtcttcagaaatccctgtcataaccttggcgcctgagttggaacagatgttgcatcagtcacttcagaatgcaggtgacgaaggtgccggaattgagccaggccttgcagagcgacttcaacaatcattgaacgaagcgcatcaaaaccaagaaatggccggtgaaccttcgatactgttaacgtcaggaatgttacgtactgtgttatctcgcttcgttaagtacaccatcccaggtttaagggtgatgtcttaccaagaggtaccagacgaaagacagattaagattgtcagctcagtaggccaacaataggatagtaaaggggttgaaccatgaaaattaaacgtttttttgccaaagatatgcgcacagcactcaaggaagtgaaagacgagttaggtgttgatgcggtaattatgtcaaacaaaaagctagccaacggcgttgaaatcgttgcagctgttgattatgacaaagcagccccgaaagcagaagcaaacccagcgccagtgcaatcagcacctgcgccacagcataacttcgtcaaacctgagccaatgcgtgccaagcctgagccgcaagcaaaagttgccgatagcttacaagcgttactagagcgtcaagccccacgccctcgttcgccagagctggcgtcaatgttcagtcagtcaggtattgatacgagtgaacactatcaacctaaagagcaaagttatgatcaacctcgtcctgaatatgctccaaaaccacgctatcaagagcaagctgctccacgtatgcaaacacaagcgcacagtttaggttttgatgatgatttagactcaggatttgatgatcttgatacacctacagagcgcaaacaagcagcgccggcaaaccaatctgaaattgcgacaatgcgcgaagaaatgaatgccattcgtcaattacttgaacatcaagtatcaggcttaatgcaacaagatatggcgcgccgcgatccgactcgtgcgtgtatgattgaccgtttagctggtatgggtattgagcgtgacgttgcagagcaaatggcctgttttattcctgacgatgtatcacgtcaacaagcttggcaagcacttctgcaaatggttgaaaaccaaatgcatacaacgaataacgaaatcctgcgtcaaggtggtgtattcgctttagttggccctacaggtgttggtaaaacaaccactgttgcaaaactcgcagcacttggtgcacaaaaatatggtgccgataaagtggcgcttatcacgactgatacttatcgtattggtgcctacgagcaacttgcaacttatggccgtattattggttgtggtgtgaagcaagtaaaagatgccaatgaattggctgaagtgctataccatttacgaaataagcgtctagtattaatagacactgcaggtatgagccaacgtgatttacgcttaactgagcaacttaataccttaatgcgtaatcagcgagttgatattcgtagttatttagtgttgagtgctacagcacaaattaatgtgctacaagaaaccgtaagacactttaaaaaggttcagctaagtggctgtatcttcactaaattggatgaatcgttgagtttaggtgagattattagcatagcgattcaaaatcgcctgccaatagggtatcttactaatggtcagcgtgttccagaagatattcgcgtagcgaatgctgaaaaactagtgaaaaaagctgaacaattgtatttaaaacgagcaaaagcacaacattcacgacgtcaagcagtagcgtcgaacacagtagggatgtatgattaacacagtattagatcaagcaagcggcctgcgcaaaatgaatcaaaataataatagtggcgttaaagttatcgctgttactggcggcaaaggtggtgtgggcaaaacgaatgtatcactcaacactgcaattgcattaggtcagcaaggaaaccgcgtattagtattggatgccgatttagggttggcaaactgcgacgtgatgcttggtttacgtgttgaacgtaatttatctcatgttttatctggcgaatgtgagcttgatgaaattcttgtagaaggccctgctggtattaaaattgtgccagcaacgtctggctcgcaaagcatggtggagttaactccttctgagcacgcaggccttattcgcgcttttagcgaattaaacaccgagtttgatattttaattgtcgataccgccgcaggtatttcggacatggtattaagcttttcacgtgcagcacaagatgtcgttgtggttgtatgtgatgaacctacctcaattacagatgcctacgcgcttattaaagtgttaagccgagagcatggtgtatataaatttaaaattgttgccaacatggtgcgtagcatgcgtgaagggcaagaattatttgctaaactttcaaaagtaacggatcgttttttagatgtttctatggaattagtcgcaacgattccctatgacgaaaacatgcgtaaatctacgcgacgtcaaaaggttatcgttgagttatttccaaactcaccagcagcggtggcgtttaaaacattagcaacgaaagcagttaagtggccgatccctaaccaaccgtctggtcacttagaattttttattgagaaactagtaaacggctaactatgacaacatcggtgaataaagcgatgggatatcaatcagcacagaatttaaatgcgattgttgaaaagcacgcctctttagtcaaaaaagtggcgtgtcatttgattgctcgtttaccagctagtgttcagctcgatgatttaattcagtcaggcatgatcggccttattgaggcgtcaaaaaacttcgacgctagtaaaggggcaagttttgaaacctttgcaggtatcagaattcgcggtgcaatgcttgatgaaatccgtcgaggcgattgggcaccacgctctgtgcatcgaaatgcacgtctagtcgcagaaacaattgctgaattagaaagtaccctaaaccgagagcccaaagacacagaagttgctgaaaaacttgatattacactagatgagtaccatcatattctacatgacgttaattctagtaaagtattaggtatcgaggatttaggtgtagatgaagacgtaataacaccaatgggtcatgatttagcactagacaaaccgtttaataacgttaaaaatgagcggtttaaccagtctctattaacggctatccaatcgttaccagaaagagatgcccttgttttgtctttgtattacaacgatgaaatgaacttgaaagaaataggacacatactcgatgttagcgagtcgcgtgtgagtcaaatacatggtcaggcgatgattaagctcaaagcaaaaatcaatgactggattaattagtagtaagtaaatataggttcaaacctcaccggaggatgttttggataaaaacatgaagattcttgttgttgacgatttttctacaatgagacgtatcattaaaaatctattaagggatttaggttttaccaatgtgcaggaagctgatgatggttcaacagcattaccaatgctacaaaatcaagaatttgattttgttgtaacagattggaatatgcctggcatgcaaggtattgatttgttacgtgctatacgtgccgatgatagccttaaacacattcctgttttaatggtaacagctgaagcgaaaaaagaacaaattgttgctgctgctcaagcaggtgttaatggctacattgttaaaccatttactgctgcgacacttaaaaccaaattggaaaaagtgtttgaacgtttaggttaatctaaggggagaggcttatgtcagcacctgctgcgcctcatataagtttagagcaagctcgtcaacttgttgagtatcttgaaaaaggtgaacaagagaaggcagataagctaattcttgaagccgcatcaaaagaacaatcagagttgtttgccgaagtcggtaaattgacgcgtcaactgcatgaagcgttaaagaactttgatcttgatactcgtctcgccgatttaactaccgatgcgatacccgacgctaaacagcgattaaactatgtcatggaaatgacagaaaatgcagcaaataaaaccatggatgctgttgaggcaagtttacctattgcacaacaacttgctgatgaaattgcaacaatcaagcccacgtgggatcgattgatgaacagagaaattgagcttggtgagtttaaaaccttatgccatagcttagataagttcatgaacaactctcatactaaaactgatgaattacaaggcttgatgaccaatgtgcttatggcacaagactaccaagatttaactggtcaggtaattcgccgtgttattgaactagtacgagaagttgaagacagtttaattaatctcttaactgtattcggcagtcaagaagatggtcagcaaaaacaagaaaaacaggccacagaacaagcacctgcaacaagcgatacgctagcaggtcctgaagggccaattattgatgcagagtcacgtgatgatgttgtctcaggacaagatgaagttgatgacctattatcaagtttgggcttctaagaggagagtaactgcatgagctttgaagtcgatgaagatattttacaggatttccttgttgaagcaggggaaattctagagcttttgtcagaacaattggttcagcttgagaacaacccagaagacaaagacttacttaacgcaatttttagaggtttccacactgtaaaaggtggggcaggtttcttgagtatgacagagcttgttgacgcttgtcatggtgcagaaaatgtcttcgatttacttcgccaaggtgtgcgtagtgtaacacctgaattaatggatgttattcttcaagctcttgataccatcaacgaaatgttctcaactattcaaaatcgtgagcaaccagagcctgccgatcctgctctacttgatgtacttcacaagttaagtcagccaccaacagcagaagagcttgcaggagaagacacaagtgttattgaagacacaacccctgcacctgaagagccagtagtagaagaacctgttgttgatactgctgatgtaacagccgacataaacactgataatattgatgaaagcgacccgtttgcttttgatatgctatttgatggtggtggtttagcccaagagagtgcttcacagaatattgatgaaatcactgaagacgaatttgaaagtttacttgatgagttacatggtaaaggtcaaggacctgcagctgcaactctcgattcaagcagcaatgatagtgatgacattaccgacgatgagtttgatagcttattagacgaacttcatggtgtgggcagttttggtgaagttaaacaacccgatacccctcaacctgaagctccaaaacctgctgctcctagcaccagtgtaagtagtgatggtgatgacgagatcagtgatgatgaatttgaagcattacttgacgaattacatggcaaagggagtgcaccaaaatcacttgaaagcaccccaacagccgcaccgaacgtagagccagagaaaccaacgcaagcagagaaacctgttgctaaggctgcgccacaacaagctgcaccgagtaaaccagcagcaccaagtaaagcgactcctgcaccagctaaagcgcctgagtctgctgctgcaccgaaaaaagcgccgccacctcaggccgaaaccactgtacgtgttgatacaaaacgcctagatgaaattatgaacatggtgggcgagcttgtattagtgcgcaatcgattagtgagccttgctaataacacaaacagtgagtcaatgggcaaagctatttcaaaccttgatgtggttacagcagacttgcaaggtgcggtaatgaaaacccgcatgcaaccaattaaaaaggtatttggtcgcttccctcgcgtagtacgagacttagcacgcagcttgaaaaaagatattaatctgcagctggttggtgaagaaacagatttagataaaaaccttgtagaagcgttggcagatccattggtgcacttagtgcgtaactctgttgaccatggtattgaaatgccagaagtgcgtgaagctgcgggtaaacctcgcacaggtactgtcactttatcggcatctcaagaaggtgaccatatcttactgaccattcgtgatgatggtgcaggtatggatgctgaaaagctgaagaaaatagcgattagcaaaggggttattgaccatgatcaagcaagtcgtttatctgacaccgaggcttataatctaatttttgcaccgggtttctcaacgaaagaagagatctctgacatttcaggccgtggtgtcggcatggatgtagtaaaaacgaagatcacccagctaaatggctcggttaatatccagtcagaattgggagtaggtactgcgcttgaaatcaaggtgccattaacactggctatcttaccgacccttatggttgtggtaggtgagcaaactttcgcattaccacttgcaggtgttagcgaaattttccatctagatttaactaaaactaacgttgttgatggtcagctaacaattattgtgcgtaaaaaagcaattccgcttttctatttacaacactggttagtgaaaggagccaaccgccaagagcgaaaagcagaaggtcacgtggtgattgtgcaaattggtaccaagcaagtagggtttgttgttgactcattgattggtcaagaagaggtcgtaattaaacctcttgatgcattacttcaaggtacacctggtatggctggtgcaacaatcacatcagatggtggcattgcgttaattttagatgtaccgagtatgctcaagcactacgttggctaataagaaatagtaatttgcagccaataggctgcattaaatacgataaataacaagagagtgccaatggcagtcaaagtattagttgttgatgattcaagcttttttcgccgtagagtgagcgaaatattagagcaagacagcaatattcaggtaatagggtttgcagtaaatgggcgcgaagcggttgataaggcccgagaactaaagcctgatgtaattaccatggatgtggaaatgcctgtacttgatggcataagtgccgttaaagaaattatggcagccacacccacgcctattttaatgttttcatcgcttactcgtgatggtgcaacagccactcttgatgcattagatgccggtgcgcttgatttcttaccaaagaaatttgaagacattgcacgcaataatgaagatgcaattgcattattacaaaataaagtaaaagagattggccgtcgtagaatctctcgatttacccgcccagcacctattgtaagaccgtcaacttctaccagttcacgcagcagcggtattgttcagcctgatcgcagttttagtcgttcaacaccgactgcaggctcttcatcgccatctgcagcaagtaacattcgggcttcaggtaaacaatatcagttggtcgcaattggtacgtcaacgggtggccctgtggcactgcaaactattttgacgcaattacctgctaattttccgcatcctattttacttatccaacatatgcctgcggcgtttactccggcatttgcagcacggctaaacggcttgtgtaaaattaacgtaaaagaagcacagcaaggcgatagactggttgctggcacagcttatttagctccgggtggtcagcaaatgctggtagaaggacgtggcagctcacgtacgctacgcgtgtttgaagacgatagtcctcgtattacttataaaccaagtgtagatgttacttttgccagtgcagccaaagcgtacggggcagatgtattagctgtcgtgttaacgggaatgggggctgatggccgagatggtgcccgcatgctcaagcaagcaggtgcgacaatttgggctcaagacgaaaaaacgagtgtcgtatatggtatgcctcaagctgttgctaatgcaggccttgccagtgaaagtcttgcattaaatgacgttgcggctcgtttaacgcgagagactggctgtggataagctttccttttttggtttaatcgttgctgtcagcgcaattgcctttggttatgcgctagaaggaggagtggtaacagccttattcaacgggcctgcgctagtcatcgtacttggcggtaccttaggtgcggtgatgctccaaaccccgggcagtgtttttgcaaaaacacttaaaattagtcattgggttttttttcctccatatcatgatatcgacgccgccattgagcaagtaaaacgctggtcacataaagcgaggcaagagggctatttatcattagagtctgaagcacttgctcattcagacccctacgcggcaaaagggttgaacttattagtcgacggtattgatgagaatagacttagagatacgctagaaatcgacttaatgcttgaacgtgagcgcttgcttgaagttagcagagtgtatgaagcgatggggggctacagcccgacaatcggtattttaggtgccgtattaggcctaatacaagcaatgcaatttattactgatcctgaaaaactaggtgcgggtgtagcaaccgcctttatcgctaccatttatggtgttggcttagcaaacctgttgtttttacctatggcgaacaagctgaagcagcaaattgaacaaaaaatgctttatcatgagttacttgctgaaggtattattgcaatctctcaaggcgaaagcccactaaatattgaacttaaacttgaggcgtaccgtgttgatcgcccaagtttagttgacgagtaatatcatgttgcgccgtcgcttgcgtcaaaacactcaaaaaagtcagcatactgaacgttggttggtttcatacgcagattatatgactattatgtttgcgttttttgtggtgatgtacgcgatcgcaattagtaaaaatgaagatttccaaatcctctcagattctcttgaacaagtttttgaaaaatcagcccgtcagcagcagcaagttggaacaggtgtcaacggcacgggtattttgactgaccgagtcagtcccgaaaatgatattttatacggagaaagcatccgtaaagatgagcaaggcccagagctacttgatgggcaaagtgagaccagtaatattgataagaagcacctaggtaaaccactcgatagccttcttaccaagttacagtctgcactgatagatgaaattcgcgatggtgaggcaagtcttgagttacatcaagattggctaattatagaattgagttcgggtatgctgttctcttctggaagtgcggtggctcagcagcgagccaagcaagttgtaagcttagtcaaagatataattgcccctgtagataactatattcgtgtgcgtggttataccgataacgaaggtattcgcaatgaaatgtttcgttctaactgggaattgtcggttgcacgtgccacttctgtgttagttgaacttgaaaacttaggtatcaaccctgcacgtatggcgattgaaggctacggacaatattcaccgtttgcgagtaacgatacagaacaaggccgagctgaaaaccgtaaagtggtggttgcgctttctaaatatggtttaccaccagagccgacaacccctagtgatgaagacactgaaaagccgcagcaacaagctcctgaaattgagttgccaagcaatgataacaccattaaagtgattcaattacctcatggtggcattcgaataaccacgcgcaatgaacaataataaggtgtgatgtgaaagtttggacagtagcaaatcaaaaaggtggcgtagggaaaacaacaacagctgtcagccttgcgggtattcttgcattacaaggtaagcgtgttttacttattgataccgatccacatgcatctttaacttattattttggtattgattctgaagagcttgaggttagcgtgtatgatatttttgcgcgcggcaacagcatggcaagtgaagaaattttgcaagcgttatgcccttcaacattagaaaaccttgatattttacctgccactatggcaattgcgacacttgatagaagcatgggtaataaaaatggtatgggcttaattcttaagaaagcgctggcaaaaattagtgaccattatgactatgcaattattgactgcccaccagtactaggggtgttgatggttaacgccttggcagccagcgagcgtattttggtgccagtacagactgagtttttggctcttaaaggtcttgaccgaatgatgcggacgatggaattaatgcaaacatcgcagtctaagcagtatcaatatactattattcctacaatgtacgacaaacggactaaagcatcacttgaagcgtataaaactctgcaggataattacaaagacaaagtatggtcgggtgttgttcctgtcgatacaaaatttagagatgctagtttagcacaacaagtgccgattcaattttgccctcgttctcgaggtgtatttgcctatcgcgccttgcttgattatttagttgcacaaggttaatgatgagtaagcatttatttgctaatgaaaaagtgatgacccaatatttgggtgctttgctgtgtgaagatgaacctagcgagcagaatcttgaacccgtagctaaattactcgagcaggttaataagcctgaacaaaagatagaagaaaagattacccctacagtaattgctactgaaccgcctttaccgagtgttgagtcaactaaagagcttgagaaaaccgagaaccaagctaatatcaaagatatagttgcagaatctaatgcagatattattgctaagacatcgtctgagcgccaagaagattactttgatggcgagtttcaggcactgttttttgaagttgcaggtttaaccttagcagtaccactaaaagcattagggggaattcatcaactgacagaggttaaccaattgtttggtaaaccaaaatggtttaaaggcgtaatgcttaaccgagatgaaaagctcaatgttgttgatactgcacgttgggttatgccagaaaaatatgatgaaagattagaacaagcattaaattatcagtatttaatcaccttaggtgatagtcaatggggattattggcagaaaagctcgtaaataatattacgcttcaaaaagaagatgtaaaatggcgagcaaaatcaggtaagcggccatggttagccggtgttatcaaagagaaaatgtgcgccttgattgacgttgaaaatttatatcaattgctagagcagggcttagacagccgtgagcagtaactatttttacggagtaatagcatgagtgaagaaagactactgtcagctaataaaaatgctgatagcaacgatgaagtgttacagtgggtaacctttaagcttgaagaagaaacgtacggcattaacgtaatgcaagtacaagaggtgcttcgctataccgagattgctcctgttccaggcgcaccttcgtatgtgttgggtattattaaccttcgcggtaatgttgtaacagtgatcgacacccgtgcacgttttggtttgatgggcgcagaagttaccgacaactcacgtattgtcatcattgaagctgaaaaacaagttattggtattttagttgatagtgtcgctgaagtggtttatttacgtagctcagaaattgacagtgcgccaaatattggcacagaagaaagtgctaagtttattcaaggtgtatcaaaccgtgatggtgagttattgatcttggtagaccttaacaagcttttaaatgacgatgagtgggacgagctgagcgcactataaacgcttggaaactatatgctgttatactctttgtttggtgcctcaatcttactagttttagtgtgtttggggcttatttttgtcaataacaataaacaagctgccgcaattcaggctaagcaaaaacagctgcaagatgctcaacaacaattgagtatattacgcagtgaagttgcagaaatgcgtgcaggaatgctcagtattggcaaacgtgttgtagctgttgaagaaaaaagtagagaacttgagcaactacaagacgcacaaaaatatgatgacccgaatgcgaaaatctattcgcgagcggttaaaatggttgagctaggtgctgatttagaagaaataattcgtgaatgcgagttacccagagccgaagctgaacttcttatgtctcttcataaacaaaaaggcgcccaatgaggcgcttttttattggaacacttctaagccctaagcttgaatgttgagcttaccctgaaaatcttgccaacccggtggaaatttaccacgcaatacatacgaaaatgcaattaattcagcaatgacatagtaaagctcttttggtatttcttcacctaactcaaggtgcgataaggtttgtgctaagtcagcgtcttgatgtattaaaatgcctttttgttcggcaagtttaacaatttcgtcagcaagttcaccaaagcctttactggttactcgtggcgaactgcccgcttcgtagagtaggccaatagcagatttatgttgatattgttcgctcataaaatttaaaccttgatgttaataatcgcatgtgacttgtaaaaggcttgatgacttggcgtaccttgttgcaaattaagctcgccaacatttagaccatggcttgctagtttatgacgcagcgtttctaaatgcgaatgtgcaagaaccgtgacctcttgtgaagaggctaataattggcaatctaccgctgtgtccataacctctgcggtaacttgtaatttaccaagctgcgcatagtcaaagtttagcctaacaaaccatacatttttactttcaagcttgtttttgctcggctttttatattggcctaagctgatttctgtttgccctgcctctgctgggagtttcatcggtaagaaaaattgtgcaagcgggttactatcttgctgttggtttatcggcgtcgtttgtacttgcgtgagagtattctttacttggcttaactcacccgctaaggcttgcaaattgggttgttgtaattgctccagtaacttactgccattaacggctttaaaattgggtactagcacttgcaataaagcatcaagacctgtttggttgttaaagcttaaattagtgggggcctgattaataataggtgcagccaaagcggttactgctagttgctctagaccttgattaaaacttgcttgttggttttgtggtgttaaagatgctggtctaagtatacttagtagttcacgctcgatcgttgctgggtgtatgttttgacttgaaatcatgcggctaaatgcttgattaactaacctatttagatcaacagaagaagacgtactttgctcactaagagcgactaacttttcacttaactgcacaggtaatggcgtgcttgtgggcttttgactctgtggcattggtactaacttggctattagtgcggcttcaattggcctaatagcgagtaggggttggcgtaaattaggctcttttgctgctaaaaaaggagcgagagaagaaacctgacttgttattgatgcaggcagttccgctttaacttttaaatgatttgccgtttgctctgtaattgcactctttgttctcgctaaggattgcaactgatcaccactcacagtttgtttaatcgccttagttgcaagcgctggattgtctttcgatactgcgttatcaatattagtggcgatgtttgaagcttgagcgggtatagagttcgccttatttatagcatttgccgctgaagttgtaggaggcttttcggctatttgagcgctattaatgagtgctgctttgtcgttgattgcgggcgtatttattaatggttcaagacttactttaagttgctgaaacaattgaattagcggcgccgacttattaaagttgacaggcaacataggttgttcgccagcagactttgtggcgggcaactgcacattgttattgatggtaggcaaaagtgggcccggctgttgttttaaaggcgagttagggtgcattaacctcgaccaatttgggtctaaagacgcgagcttaattatattgatttgtttagcattataccctagctggcttacactgttgcttgtgcccggcgtttgactaacagataagttagctgttgattttgttgttgctggtaaacgctcaaagtaacgcactgcatcactaatacgggttttcaaatcggcaaaactgtcttttaaccaagagcgtattggtgaatcattactacttgatggagccaaaggcgttgtcttactgtcaagtggttggcttttaagagcatgtgtaaatgtatctgagagtgagttttttaataacaaatgttgtattggcgctttgttgacaagttcaatggtctcttttacgcgctgtgatagcagttttagcgtatgaggattaaattgccaatgcgcttgaatttgttttgcttgttttggggggattgctgcaagtggcagcgttaactcgctattttgtttggttgctaaactcaattgtagctgttggccggtgagttttaagtctatttctgggactagtttagcgactaaatcagcgactttttgttggctaacactttgttgatgcagtgaatccccaaagcgattaatgatgtttaagttaaaactattttgctgatttgtagctggcaacaagattgcttttagtggcgcttcagtttttaacagtgttgccaaggtgttgttaagggcaaactctgtttttagtgatggcagttgcaatattggctgattgctggcaatagttgccgggtagggcatgtttgtatttgcattcccctgtgtgaacaagttaagaagtgcttgcaactgctgacttttgcccagtgtaattgtgataggcagaggcgtaatagtgagccctttgccatcattacttaattggatgtttgccgataaaaatcgttcagttttgggattttcttgctcagtagataaacgcaatgtttgccatgcattgttgattaatacatccatctgcacactgtgtttgctaatcacgatattacgggcagttagactctgatcagcgagcatttttaatgcctcgcttgatgaatgttgtgaagcactgctaatacttttagggtcaatattaagctgggtgctgagagtcaactggctttgtttattcattattttagatcaaatataagttaatcgttttaaagcaatattcgtattaccctatcattatggtagactaacgcctaattttgggtatagagaatcgtcatcttgttacacattaaggccgtcacctgcatcaagcaagatcgttgtttgtttgcggatcttaatttcagcttaaaatctgggcaaattatgcagttagctggtccaaatggggctggtaaaacatcattattgcgtattatcgcaggtttcgctatgcctgatgaaggtgaggtattatggcaacaacgttctatcgcaaaatactatgatgaatttgctgatgagttattatttatcggtcataagacaggtgtaaatagtcaacttacggcacttgagaaccttgctttttggctgaaaataaacggctatgatagcaagcaagacttatatccggtcttagctaagataggtctagtgggtcttgaagacgtacctgtgcgcatgttatcagcaggacaacagcgccgtgttgcattggttcgtctttggttaaataacgccaaactgtggatattagacgagccttttactgcgcttgataaaagtggggtggcgtttttgcaagagcgatttgttgagcatcttaatgcgggtggagctattttattaaccacccaccaagatttaacggcacattttagtgaccttaaaacagtgactttggagtatcgccactgatggtaaagcagcactcgtattggcaactattctctgcggttttttcaaaagatcttaaattagcgtttcgtcagcgtgctgaaatcgttaaccctatcttgttttttcttattgtaattacactttttccgttagcaattggccctgaacccggtctacttgctcgtatggcgccaggcattatttgggtcgctgcgttactgtcgaccatgttaggcctagataagttatttcgtgatgattatcacgacggaacactagagcagttaatcgcttcggcatacccattaccactgaccgttcttgctaaagttgcggctcattgggttattacggggctgcctcttgtgcttatgactccggtatttgctttattattgaatttagaaagttcagcgcttttagcaaccgttctgacgttattgttagggacgccattgctgagtttcattggcgcaattggtgctggactgactgtgggattacaaaaaggtggcattttaatgagtttacttgttttgcctttgtatatccctgtactaatttttgcaacctcggctatcgataccagctctatggagcttgcctatagcggacagcttgcaatccttggtgccatgctaatcgtagcgattatagcggcgccaattgccatatcgtcagcattgaaagtgagtgtaagttaatatgtggaagtggttacatccctacgcaaaagcagatcgtgcttaccaattgtgtaacaccttactgccttatttcgccgtcgttacggtggtctgtatgattgttggatgggtctgggggcttgcttatgccccagccgattaccaacaaaaagacagctaccgaattatttttatccatgtgccttcagctattttatctatgggcgcttattcttctatggcgattgctgcagtgatcgcactagtatggcaattacgtaatgcagaactcgcagtgattgcaattgcacctgttggggcatgtgtgacagcgatagcattaattaccggtgctgcatggggtaaacctatgtggggcgcttggtgggtgtgggatgcacgcctaacctctgagctcattctgttatttttataccttggtgtgttatcgctttatcatgcttttgaagataaaaaagcggcgggtcgggcagcctgtattttagcgattgtcggggtgatcaatttaccgattattcacttctcggttgagtggtggaataccttgcatcaaggtgcaaccattacaaagtttgatactaaagccattgatccaagcatgttttggccactgatggtgaatattgtggcattcgcagcgttcgtcggtacggtgacgttaatacgtcttaagaacgaaattttacaacgtgaaaagcaccgcccttgggtgcgtgatatgcttgagcgaggttaatcatgcagtttgattcttttgcagattttattgccatgggtggctatggcttttatgtttggctgtcgtttggcagctgtgcattaattttacttggtattttatttagttcgttaaacgacacaaaacgtattttctcttcagtaaagcagcaagcacaacgtgaagagcgcattaagaaagcgaagcaagaggcagggcaatgaatccaagacgtaaaaagcgtttattagcggttgtagccattatttttggtgtgggtgcaacgattggtttagtgctgtatgcactgcaagaaaacattaatttattctatacaccaagtgaattggttgatggaaaagggcctaataaagaaaaaccgcatattgggcaaaaactacgtatcggcggcatggttgtgccaggctcagttgtccgtgacgaatcaagcttaaaggtaagctttaagttaattgatacgggccctatggtgacaattaattatcaaggaattttgccggacttattccgtgaaggccaagggattgtggcacagggcgtgttagtgaaagcgaatgaaattgatgcctttgaggtacttgcaaagcatgatgaagaatacatgccagcagaagtcgcagaagctgtgaagggtatcaagcacgaaaaaccgacctataacttagataacggcaattaatatgatcccagaactcggttatttttctttaacactggccatggtgctcagtgttctactgtgtatttttcctttgtggggggcgcataccggcaatttaaggttaatgcgtgcagccccatcactggcaattggtcagttcgtattcgtacttttatcttttgcagcacttatttatgccagtttaaccgacgactttaccgtttcgtatgttgcttatcactcaagtagcaccttaccttggtactacaaaataacctcaacatggggtggccatgaaggagctattttactttggttagtgatgcaagcaggttggacagcggttgttgctatgcgttcacaatcattaccttgggtattacgtgctcgtgtactgggcgtgctaggctttttaggtgttggctttatgctgtacaccttgttaatgtcgagtccatttgagcgcttattaccgtatttccctgttgaaggtcgcgatttaaacccattactgcaagacccaggtatgatcattcacccgccattgctctatatgggctatgttgggttatctgtgtcgttctcattcgccattgcggcgttacttacaggcaaactcgataatacttgggcaaagtggtctcgtccttggacaatgactgcatggggctttttaacactcggtattaccattggtagttggtgggcatactcagaactcggctggggtggctggtggttctgggatcccgttgaaaacgcatcactaatgccttggcttgtggcaaccgcgttgttgcactcattatcaaccacagaaaaacgtggtgtatttaagtcttggaccgtattactagctatagcagcattctcgttaagcttactgggtacctttattgttcgttcgggcattattgtatctgtgcatgcttttgcgtcagaccctaatcgcggcatgtttattttagctttcttggccattgttgttggcggtggtttatcgctttatgcactgcgtgtttcgcaggttaaaagtgaggggcgctataagtttgcttcacgtgaagtagcgctttggttaaataatattttcttagttgtggcaacactgattgttttactgggcactttattgccaatgatccacaaagaacttggcttaggcagcatctcgataggtgaaccattcttcaataagatgtttgctattttactcgtgccatttgctatcttaatggggataggtccgctgttacgctggaagcaaaacaagtggtcaatgctacagaacaagctgttattatcggctgtggtcagtgtggttgttaccggtgcatggttatattcaagctacgacgtaattgcgccaattacctttattgcaaccgcattagcagtatggatttttgttactacactgatagatttagctgcaaaagtaactattcataaaaccataggtgaaggctttaagcgattaggtctaagctattgggcaatggttttaggtcatattggtttagcgtttgtaattgcaggtgtcacgttaacctctgcttactcggttgagcgtgatgtatcaatgaaaccgggtgacacagtggctttaaatgaataccagtatcgctttgacggtgttaagtctattcgcggggctaactacagtggccatgctggggttgtcaccgtgctgaaaaacgataaacaagtgacggttttacatgctgaaaaacgccgttatgacattggcatgcagtttatgacagaagcagctgttgatgcaggcttcacccgtgacttgtatctagcgctaggtgagaaattaagccaaggtgcgtggtcgttacgtatttaccataaaccgtatgttcgttggatgtggctcggtggcatcttgatttcactggcaggctttttagtgcttggtgataaacgctatcgccagaaatcgactaagcaggaggcttcagcatgaaccgcaaattgttagcgctagcgccattattggttttcgttttgttgtgtgtgtttttatatcaaggcttgtttgcaaacccgcgtgagctgcaaacagggcgtattggtcagactatgccaacatttaacctacctgatttgatggatgagtcaaagcgttggacagatgccgatctgaaaggcgaagtatacctgctgaatgtgtggggcacatggtgcccgacctgtttagctgagttaggttatttaacagagcttagagaacagggcgttaagattattggcttatattacgagcaaggttatgaccctgactttgatggccagtttgatattaatgcgttacgtgaagatgtaaccagcatgctaaatcgcgctggcgacccttatcagttcaatattttggatttaaagcgtacattagcccttgatttaggggtatctggtgcacctgaaacgtttttagttgataagcagggcacaattttgcttcatcacaccggtgatattaatccacgtgtttggcgtgctaaatttgcaccgttaatgcaggaattacagcaatgagattcgttattcttctagcaagcttgctgatcgcctttagtgcaattgcagagcaagacaagtaccagttcgatgacaaagagcaagctacgcgtttcagtgaattaactaaagagttacgctgccctaaatgtcaaaatcagaatattgccgactcagacgccgttgttgccaaagacttgcgcgataaagtattagccttagtaaaagaaggcaaaacaaaagacgaagtgattgactatatgattgaccgctatggttacttcgttcattacgatccgcctgtcactccagcaacacttgtgctttgggttttaccagtgctcattgtggtgcttggctttggctttattgtattgcgtcagcgtaaagcatcagtaaagcaaacatggactgagcaagacgagaaattacttgcaaaactaattgaacaaaatcaacgtcaggagcaaagctaaatggcattaatgtgggcttcttttgttttactcacactgattgcattgctgtttgttgtcgtgccgttttttaaacgcgaacgtattcaacgccttgatcacaatgcaaactcggaattgatccgaatttattaccaacgtttagatgagcttaaagacgatcttggaaatcaacgtatcgatgcacaaatgcatgacgaggcagttgttgagcaaaagcgtcgtttacttaatgagttatcaccagaaaaagccttaaacagcaaaggtaacaatcgtatatttgctttaacaggagcaggctttttaatcgttttaacagctattttctatgcctacactggcagtcagcagcaaataaaaggctggcatgatgcaatggcaaatctaaagtcatacggtgagcgagctgtgatgcaaaatggtgagccgttgactgcaaatgaacttcaagcatttgcattagcgttgcgtactaaacttgatcaaagtggtgatgacgaagtagcctggatgctacttggacgtgttgcgatgtcgttaaatgaatttgatatggcaaagcagtcatttgataaagtattgaaaatgaatccggataacaagcaagtgctgatcagctactcgcaagttctgctaatggaaggcaatgacgcgaacatgtctcaggctgcgactatgctttcaaaagtgttaaaagcagagccaaccaatattgatgcaatctcattgttggccctaattgcctacgagcgtaaagattggctgcaagctaaaaccgcgtttgaagtactgctagcgagcatggagcaaaacgaccctcgttatagcatgattgcagagcgtattgctgaaattgatgcccatttaaataatgagcaagtcacaaatacagaagtagctgatgcttcaaacagtgaaattagcatcacagttgatttggacccagcacttgctgactcacagccacaaaacggcacgttatttgtttttgcaaaagcagccagtggtccgcaaatgccattagctgtggtaaaaatgacagaatatagctttccactaaccgtgacgttaagtgatgctaacgcaatggttgatggcctgaatttatcgagtgttgagcaaattattttaaccgcgcgtttatcgaaagatgcaactgtggtaacttctagcggcgagttggaaggcaagtcggatgtcttagagcgtgctaacgttaaagaatattcgttgctaattaatgagttaataccttaaggatagccaatgtttaggcatagtatatttttaattttttttgctgtacttgcaggatgcgcacaagtacccgaagaaaaagcggatgatcgagatccattgcagtcattcaatcgtcctatgtatgactttaacatggacgtgcttgatgcttatattctgcgccctgctgcggttggctatgttacagtgacacctatgcctgttaggcgcagtattgttaactttactgataatattactgcaccaactgatatggttaatgctggtttgcagggcaaaccagcgaatatggggatcagccttgcgcgtttcttagtgaactcgacggttggcttatttggctttttcgatgtggcctcttcattagggctagagatcgttgatgaagattttggccaaacgctaggtgtgtggggagtaggagatggtgcctacttgatgatacctggaatggggccaagtacagtacgaaatttaacgggtgatgtagttgataacatagtattacctgaaatagcgttaacaacacctcaaaccattttagtgtttgcactgaaagcggttgaagcgcgtgcttctttgatacctcaagaaagcctattaaatgagtcacttgacccgtacatatttgttaaagatatctatttccagcgtcaattatatgagcttcatgatggcaatccgccaatggaaaaagagccagacgattttgatgaagacttcttagaaaacctttaatagcgttgaccacaacgaaaaaatgccagcaatattgctggcatttttgtatttacatttcgaacattagtcgccgaatacagacatttgttcattcgaccagttcaatgcatcgtgatatgcatcgggcacctcttcgggtttgaggccgagttgttgttggatctctttggcactttcccaatcagcttgctcgtaaaacttcacaaggcgtaaatacgatgctaataaaccttcgtcatgaagaagggcacctttaatttcatttgttagcggtaatttgcccattacgcttggcatatcttcatctaagattgcatccataagcgacatcataccggtcaaaaatgccattccagtatcgcgtaattgcccatgactgatagctaacagctcagcaaagcgagctcgcgtgagtgataagcggatgagttcagcaggcttatctgcagccacttgtgcggcgaataacagcgataagaaacgtttaatttcttcgctacctaaaacgataagtgcctgtttgatggtgctgatttcagcacgacgtttaaatgctgcagagtttgaataacgcagtaacttgtaagataagttaacatctttttcaaatacatcggtgatttttttaagatttaagtcaatactcgatgtttcatacaaaagctcagctaatgccatctcagacggtggtaaagttttgctttgcaccatctcaggtttcgaaaagaagaagccttgaaagtagctaaaacccatatcaagggctagttgatacttctcatgggtctcaactttttctgccaacaacttaatgtgtgggtgaggctttatagcttcaatcaccgtctgcagagattcaggtgtacaggttagaaaatcgatttttataagatcaatatacgggtaaaaatgacgccaaactggttggtgaatataatcatcaagtgctagcgtatagcctctttctttcaaatctttgacaagagccagtaatcgcttaccaggttgaatagtttcaagaatttcaactacaacattgtctttacctaataataacgggtaacccttttgtaatgtttctaacgtaaagtttatataagcaggtttgttgtctgttaagtcttccaaaccaaagttaaattggctgccttcaatgagccgtgacgttgcttcatcgccatcaatatctggaaacacgttatctactccatccctaaagaggagttcgtagccgactagtttcttttccttatctaaaatcggttggcgcgcagcgtaaaaatacatagtccaagcttgtccacatcagttatttcattatcccctcgcaatatatgccattgtatctaaaatagcattaataaaatgacaagatatggggataaattatgattttatcttaacgttaagactaggataaatcgtaatgaaattctataagttatgattaaatatcacaattttgttagcgtatcgttgtaaatgtaaacttagttggttatcggcaccattggagttatagtgtcgaagcgtggtatagtcatgagtgatatcggtttttaccccaataatgtcttataattaaataacttgcgagtcattattcggattaaaagccaacattaactaatttttggaggctaatttggaaacaggaatgataatttcgttagcattatacttcatcgtaatgttgggaatagggctatatgcctataagcaatcaacagatgatgtgtcaggttatatgctaggtggacgtaacttatctccaagtgttgcggcgctttcagcgggtgcatcagacatgagtggttggttattaatgggcttaccaggtgcaatgtacttatttggcctaagcaaggtttggattgcaatcggtttagtgcttggtgcatgggctaactactttttagtggcacctcggttacgtgtttacaccgaaaaagccaatgattcgataactatccctgattactttgcaaaccgtttcgaagataataaaaatatcttacgtgttatttctgcagtcgttatcattgtattctttactctatatacctcatcaggagttgtagcgggcggcaagctgttcgaaaattcatttaatatgagttatgaaatgggcttgtacattactacgggtgttgttgtgctttacaccttatttggtggctttttagcagtgagcttaactgacttcgtgcaaggctgtatcatgtttatctcgctgttagcggtgcctattgcaacctacactatgcttgatcaaccatttatggatacgcttgcaaatgcacgctatgacttattattaagttctcctaaagaaacagaaatacatgcacttaacatgatggactggttcgctggtggttcaacaattgccattatttctgcaatggcatggggcttaggctattttggtcagccacatattattgttcgtttcatgtcagttcgctctgttaaagatatgccaacgatgcgtcgtgtaggtatgtcgtggatgacgctttcagctattggtgccgtatttacaggcttatttggcgcagcgtacatgctcgaaaatcaaatgccaatcgatgataaagaaacgattttcttggtgttatctgagcttattttccatccacttattgcgggtttcttattggctgctattttagcggcaatcatgagtactatctcgtcgcaactattagtatgttcaagttcactaacagaagatttctataagatttacttaaatcgtagcgcttcacaaaaagagctagtgttagtgggtcgtatcagcgttattttggttgctttatttgctatttatcttgcgtatgaccgtgacagctcaatccttgatttagtaagtaatgcatgggctggttttggtgctgcatttggtccgcttgtgctaattagtttgtactggaagcgcatgaacttacaaggagcaatcagtggcatggttgttggtgcagcaacagtgttgttttggatttacgcgccaatcactattgacggccaagctctaagtgcaatcatctatgagattgtccctggctttattttatcaacgatagcgattgttgttgtaagccttatgacagccgagccgaaaaaggaaattacagacttatttgatgaagttgaatcatcactgtagtttttgattaaacacaaaaaagggcaacagatgttgcccttttttaattttatagcgaatggttagcttgcagctttctcttttatatctgcaacgttatcgtttgactttgcttttttaggcttcgcaggtgcttcttttgcacctttgagtacagccataaattggtctttttcttttgccatttcaagcgccagtgactcaatttgttgctcgcttaatggtacatcaactttttcaagcattagttccaatgactcagcaatgtcgagcattttgtcatacgcatcagcttcttttttagtagtaaacgtcatgcgctcgactccgtttctttctacaacatatttaacaacaacagccatgatctctcctgcatttaagcgtggcatttgtagcgtaaaatcgccaccttgattactgtttttatatacagtaatgtgttgtggcattatttgcaagtagcaacttacatttttctttctatcatttgacaaagaaagcgaaattagcttaatttaaattgttacctaaaatctatccaagcatcggaaaactgctaggcctataattttaagaacacaagcgatggagcgagtgtttggtaacaaaggaaattagttgtccaagtaaggacatcatggaggaaaatatgaaattattatcaagtctattgttagcttcaagccttgcgcttttgcccgccacagctgcacttgcagcgaaacctgttgatgttgcagatgttaagctacaaaaagtaagtttgaataaagccacgttagagcagcttactcaattaccaggtattggtgaagcaaaggccaaagcaattattgaatatcgtaagagccaaggtaactttaaaactgtcgaacagctaaaagaggttaaggggattggtgagaaactctaccaaaaattaaagggacaaattacgctttagaaagccactctgtcaaacagggcctaacagccctgtttgtattctttaatagcggtttgcagatgtggcaatgcaaatatattttcgagtggtgtggttaaaagcggatagcttatccccgctaacagtaaccagggcagaagcatccatccttcaaaatacgcgagccctaaaaatagtggtgccaaaaaagcaagtttacagacagataaagtgattttgtgcatagggctcaaatggctaagtgcaagggcaatgatttgctggcgctgcctcactttaaaggcctttaattcaggtatttgactggtaaaaaaatatatcattacagtgactttttgcatacaaggcggctaattataaccactaaaaatacgacagagaacgcagcgaagatcacttccatccaagctggcatactcagcgatgcaaactgccaatctatattgccgcaatcaccagtagcagcaaagaaacttgggatccactcatgaagaggcataaagcttggaaagtttggctcaaaagcacagctgaatgcaaaaggatcagtgttgttttgcattgcaatgtgttctttggcgataaaataaccccaaattgctgatataccccaactgacaaatgctaatactctacataccatcgcctgcgggttaatcgcacctataacaccagcagcaagtaagcctaatactgctgtacgttgataaatacacatgatgcatggctcaagacccatattgtattgaaaaaacaatgcggtgatttcaaatgctaaggatatcacggctaataatagccaaggtgttcttttagttgctaattctgctaaccaattcatgtatgttccagtttaaaaatgttttcaagattatgcttacactgggaagggggtgcaagtctctgcgataaaattaaacaaaaaggagcctgttggctcctttatttaactaatagaataaggtggattaaacgcttactgcttgtaatgattcactttgataacagcctaatacacgggtgtactgggtgtgttcttttagctcttcgagcgcttgtttaacatgtaagtcatcaaggtttgcttcaaggtcgacataaaacacttcttcccatgggttaccaggcacagggcgagattcaagctttactagattgatctgatggtgtttaaaaatcatcagtgcatctgctaacgaaccggcttgttgttttgtagccataattaaactggttttggtcggaatttgctttgaaacttgtagcggcttacgtgctacaacgataaagcggctatgattttcactttggttagcaagacctgacttaacaacctctaggccaacatttttaccggcttgtgctgaaccaattgcggcactgttaggtgtttcaacagctgattttaaggcgtgataggttgagtcgcaggtttcatgctgaatatctcccaaaccttggataaagcggctgcattgagcaaaaggctgagggtgagcaaacactttgttgatgtgagaaagctctgtgccaggcatcgctaataggcaatgttcaacactgtgtgtcacttcaccgacaatggatacttgcgcatgttgtaataaatcaaacacctcattaatactgcctgagctggtattttcaataggcaataagccaaagtctgcctgaccactttctactttacctgtgatttgatcaaaactagtacagcccatttcaattactttacctgggcgacggctaaaatatttatggcaagctagttggctatatgagccttgcccacctaagtatgctacgcggtgtgtttcgctcattgcttcagggttgaggttcttttgcaacatggcttgctgatttaaaactgagtcttcaagaatggtctgaaatacattgtttatgtagtaggcgtctaggccaagtgatttaccatagcttattagcttttcgagcaacgcttgctcacgtgcttcatctcgtattggtttattgttagcaattttatactcaacaacgctatggcttattcggcgtcttttggccagtaagactaataaatctgaatctatttcattgatatcgtgtcgtaatgcatttaatacatcattgctcatgttggtttcctcattccaaaacagtgcacaaacaaaaaagcctcccaagagggaggctttagctattcggtgaatttatctcgcaaacagttaagcctcctctatctaaagaagctaaaaaacgaaaaacgtgtgcgagagataattttattcattgctttaatgtaaaaacacttgtacacaaagtcaactgcatatcgcagtaatttataaatgagtacactgattaagaaaattcattaatcttcataaaaaatttataaatataaaaatgaatctggtatatttgtttttgcataataaataataacaattattaataaggtagtcctgtggtgtatcgacgaccgccatcacggtttggtgtgaattcattaagtatgaaattgtcgctgctgatctctgcgatttgtttaattgcgggtatttgtgcagcggctttaatgctcaaatccgaagagaagcaactcgtgtttgaagagcatgatctcttaaagcactcaagtgaacgcttaacaaagcagtttaatcatttaatcaacactaaaattaatattgcggaacaggctaattccgttgttagtagtcagttgctacaaagcgactctcatttgcaaagtaattttaactcagaaattaaatttgctgtagacggcagtattcgtagcacttctgctgatgggttatcagctgcatttataccacaagaaaattactcaccgttttacaaacaattaattaatgattccgagtcattatggaaaattgtttcacctaccttaattcaagactttttcaatttctatctgatcacaaaagacaattttattcgtattgcgccgcctaactgggcgctaaatgttccgggcgattttaattttacgactggtaaaacctttaactacgctaaagaagctaccaacccaagtcgtgaagctgtttggtcaaatgtttattacgataatatatggcacaaatgggttgtgagtgtgctcgttcctatttatcgtggaaatgagttttttggtgtaacaggaagtgatattgcacttgaaacactgctttctcaattaccgattggcgatcgcgaacaaaacctatttgtttttgatgcgaatggtcaattattggcgcaccctgatttagataagaaaacattagaaaagtacgggcgtgatgggaaaaaattagcgactcaagattttgtgaatgctgacttgcaaaagctagtctctgaaaccattcgtcttaggttgcctgagtcggcaaattcatttgtacaagatggtgaaactcacattatcaatatccgcaaagttgaacagctcgactggtatattggtatttataaaaagcgttcatcggcattatctgcgttagaagagctgaaagttaaattttttggcttatttattttgtacgctattttagttgcactgttacttcatcaagcactttatcaattagtgttacgccgtattcactctttggttaatgctgtggtgagctttggtaaagggcaattgcaaacagagtttcccaaagaaaataaagatgaaattggtaccttgaatggttctttcagagatatggccgttgagatccgtaaattgatagatggtttaaatcagcgtatcagtgaaaaggaaattgcagaaaaagcggcaaatcgattatctaaggctgttgcattctccggaacaggggtggtcattacagatgaagagtttgaagtaaaatacgtcaacccaaaaatggttgagatgacaggctttgaagaacgtcactttataggctctcctttactgagcattatttcacaagagatggcaatattagttgatgatattgatattgacctgcgaagccgaaattattggcgcggtgataccctattacaagcaaatgatcgtcaatctgtttgggtttctttaagtatttcgccaattcgtgaagacagtggtgagataaccagttacgtggcatcagctcaagatatttcttttgtaaaagaaagccaacgtaagatggagcaacttgcttattttgataccttaacggggcttgcaaaccgtactttctttagaatgcaattgcgtaagtctatggccttagcagagcgtggtcattatgcctttgctttgttctattttgatttagatgaattcaagcgtatcaatgatacgttaggccatgacgctggtgaccaattactggttgaagtagccaatcgcttgaaaaaacgtttacgcacagaagataccatagcccgtttaggcggtgatgagtttgcggttttacttagtggtattgagcatcaaactcatgcgacagaagttgctaataccatccaacgtacgcttaatgagccaattaagttaggtaacaatgaagtgatcattagtgccagtattggtattacaatggcaccatttgatagccaagaagaagaccaattactcaaacatgctgatcttgcaatgtatgaagcgaaagcaaagggacgaaacacctatcacttctacagccaagaattaaatgctgctgcgaatgaacgattattcattgaaaatgagttacgtacaggtattcgtgaaggccaattcagagtgtactaccaacctcaagttgattgtcgtaacaaccaagttgttgggtacgaagcgctgatacgttggttccatccggaagagggaatgatcccaccgacaaaatttattcctattgctgaagcaactggattaattgttgagttaggagcctggattttaaaagaagcctgtgagtttgcagctcgattagcagatcagaatttaaaaaataatatctcgattaacttatctgctcgacagtttaaagatgccaacctagtatcgacacttgataacattattaagcaaaccggtgtggagccaaagcgactgcacttagagctcacagaaagtatgctgatggggcatgtagaagctgctatcttgcaactacatcaactgaaagcattgggcgtgtcgatttcgattgacgactttggtacaggctattcatcattaagttatttgaagcgtttcccggttgatattttgaaagttgaccgctcgtttgttaaagatattcctgaggatagcaacgacatggaaatcacggctgcaattatcgcgatggcgcaaaagcttaaactaaacgtggttgctgaaggcgttgaaacgattgagcaaatagaatttttgcaaaataacaattgttatattgtacagggcttctattacagtaaaccagtcccagaagatgagttaccagcactttatgagcacctaagctcaatgaagtcataatgagtgagggggctgactagccccctgcaatttttactttaaatttaagcccttcgagaatagctttgagtttttctctgtcgtcaccttgcacctcaatgatgccttctttaacggcgccaccttgacccattttacttttaatggttttagccagcttttttaagtcatgttgctcactgtcaataccaacaactagcatgacgcctttgcctttgcggccttttgtttgacgctcaatacgtaaaaagccatctttaaacgttttgctttgggttggctttgtttctttaggttgttcaatacggccagtcgctgttgaataaactagattattgtcgctcatagtggatctcattgtgaaagcttgcccaaataataacaaatttcattctaagtgttttaatttttggcttatttcttttaagcagttatatttagataattctgaggaaggaattgtttgttaggagtttattatgagtttaacgtgcagtacatctgcagatggcgaaattttaaccgttcagatcaaaggaaagtttgattttaatctagtgcaaacttttcgtcaggcttatgctgacttaaacgataatattaacaaagttgttattgacctaagagaaacagactatatggatagctctgcactaggtatgctgcttaacatgaaaaaaaacctttctggtaaggtcgacacaattcaaatcagtaactgtcagccacagctaaagaaaattctgcaaatttctcgttttgacaaaaagtttgatattgattgatgctaaatatactggttgttgatgatttagagttaaatcgccgtctattaacagtgatgttagagcaacaaggttatcgtgtttttactgccgataatggcttgaatgcattaaagctattagaagagaataaaatcgacatcgtgttacttgatgtcatcatgccagttatggatggttttgaaactgcatcgataatcaaaaagcgcttcagccaagtttacctgccaattatttttattacctcattagaagatgaggcaagttttgagcgttgtttagctgttgggggagatgacttcttacaaaaaccatttcaagaagtgattctaaacgccaagataaaagcacacagccgaattagaaacttaagccaaaaagcccatgatcagaatttgcaacttgagtaccatcaaaatcaagttgaaagagagcatgagattgttgagcatatctttaataacgcattagaaaaccagcaagcatttcctgctcatttagacttccatttatctcctgccgccatgtttaatggtgatatgtttcttgtggcacaaagccctattggcagtttatattgcatgttaggagactttacaggtcacggcttagctgcagcggttggagcattacccgcttcacgcgtgttttataccatggtaagtaaaggtatgtcggtcagtgatattgcggctgaaattaatactgtactgggcaatttactgccaggccacatgttttgtgctgcgactattttagagttgagtaaatctggaagaagtgtttcagcatggttaggtggtttacctgacatttatgttattaatgaaaaaggcaacatagcccgaacactagaatcacagcatatggcgctgggtattcttgagcctgaagagtttgaacgtggtttaattcacattgaagttgagccatcatcgcgaatcgtgatggcaacagatggcattattgaaacaactaacctcaatgatgagtactttggtgaacaacgatttaaaaaagtattagcgtcaaaatcgtatataagtacagaacaaataattgagcgtgttaatcgttttgcgcgtggcaatcaacaacaagatgacttgagcttagtgttgttaaattgtttgccggttccttcaccagaacagacatatgagcaattttcgcctttaccttttcatatctcaatgagcttaaacgcaaagcaaattaaaagtaccgaccccgttttagaagtgatcgaactgcttagcaaaattggtggcttaaatgatcatcgggctaatatatttttgatgttatctgaggcttataataatgcacttgatcatggtgttcttgggcttgactcagagataaaaaaccaagaagacggttttttaatctattatcaacagcgagaagaagctctggcttcgttaagcgaagcattaatcattatagatattcaatatagtcccgaaacattagaattagactttacgatttgtgactcagggaatggattttcaaaaacagggcagagtcagcaaaacctagttagagaacatggtcgaggtctatgtttactttctgagatagcttctaaagtctcatttaatagcgctggcaaccaagtcgaaattaattataaattaactgcaagcaaagctagctcacactaaaatcgcatgttatcatttcggcattatagatgtttggatggctaaatgatttctacttacttatctgttgcccaactagatttacctgaaaaccttgttgcggagcaattatcaaaccttgagcaaaatcttgcagagtcagcattaccttcagtgcgctggcagtatcaaatccctgagctaggcgaggggggggcgtgtagcttatttggttatttgcaagatgaaccattcaaattaaacgactatgttgcagacaatgctgtaaacactgaaaagctggctaagcttcaacaaatcatcgattttgtcgtagcccagacgcaagtagattggtttggtatttatcaagcaacaaatacagacgaaggcccacagttattgaagctggtttaccatggcgcgccaagtcgtccgttatttcctctaacagacgcattcgctaagggtagcaataatgtacaggttgcactatctaagcaagggcgtgtgatcaataacgttgctgattaccttgctcaaggtggtgagtactatacttgcgatcctaaagtgaaagcagagacctgtttaccattactttcagacaaaaacgaatgcttaggtattatagatgcagaagcatttaatactgatttctttgatcaacaaacccttgcattacttgtggcatgttgtattaaaattcctcaactcttggtctaatttaactagtaattaggctgggtttttatgttaagctagtggcaacgctaacccctataaaaagagatagtcaatgttctcagaattaaaaccattaccaacagatcctattcttggcctaatggcggcctttaaacaagatacaaacccgaagaaaatcgatttgggtgtaggtgtttataaggatgagcaaggcaatacgcctgtattaaaagcggttaaaaaagcggaagcgtttcgtttagaaaacgaaaccagtaaatcgtacattggcttggcgggtaacttagattactgccaaaaaatggaaaacttattactgggtgagcatcctgcgttattagcaaaccgtgttcgcactgcacaagcaccaggtggtacaggtgcacttcgtgttgcagctgaattcatcaagcgttgcaataaagatgcaacggtatgggttactacgccaacgtgggcaaaccacatcagcttatttgaagcggcaggcttaacagtaaaagagtacccttactacgattacgaaaataaagacctattgtttgatgacatgataaacaccctaaagcaagtgcctaaaggtgatgttgtgttattccacgcatgttgtcacaacccaagcggtatggatttaaatgctgagcaatggagcacagttgctgatcttgctgttgaagttggttttacgccacttgttgatattgcttaccaaggttttggttcaagccttgaagaagacgctgcgggtctacgtaaactagcagcagcggtagatgagctaatcatctgttcttcatgttcgaaaaacttcggtctataccgcgagcgtatcggtgcgtgttcaattattgcaaaagatgctgcaactgctgatatctctaactctgtattattaagcgttgtacgtagtatttattcaatgccgcctgcacacggtgctgatattgttagcacgattttaggcagcactgagcttacgcaaatgtggcacgatgagcttgatgaaatgcgtaaccgtattaatggtttacgtactttaatcaaagaaagcttagcagcgaaagggattgaacaagatttctcatttattgaccgtcaaaatggtatgttctcattcctaggtattaataaagagcaaatcgagcgcttacaaaaagagtactcaatctacattgttggttctagccgtgtaaacgttgctggtatcagtgatgcaaacattgattactttgctaatgcagtagcagacgtttgtaaataatcggctctatagcgataaaaaaccgcagtcacactgcggtttttttgtatctaaattttatttgcggacagggctaatgtaaccagcgtatcgcatcatttagcattgaattatagctatcaagcggtgcatcaaggctggctatcagtatcgtatcagcttgttttccgcggtttatatgcccagcaaaacgttcatcactgaaatcttctgagccagtaccaaaaggctgttcgtcagcaggaacgataaagacagtcattggaccaaagtcagattcaaataccaagtgcaggccttttttcccctgaaaattacaaaacattaaataagtaactttaccgggtagctcatctaaatgtccgccaattgtggcaaacttttcgttcacataggcaaggtcaataggctcatgtttatcaagcgagtcaatttcatgatacaaatgagtaaaagcatgctcaccaacactgtataacgtatgctgtttgttagtaacgaagaacacactaattgccactaaaaacgacgctgcagccgctaaatacaagcgattaaaggcaaagcgcgacttagcctctataatggtgtctcgcggttgctctgaaggcgcttcatctgcggcataggtattatcaataattcgctttgctagattttcaggcacgggtacgttgagtgccttgcttagctcatcatctaaggcacgtacatcatcgataaacgcctgtttatcttcgtcctgctcggcaaacgcgtcaagctccttatcagtcgtgcttggctcggcgaggatgcggcggcgaaactcgagttcatccattaatttgatgctcctctaagttgatcatcatcactgcttaaagcctctttaagctggtttctggcacggaaaagacgtgtcattaccgtgtttttatttaaatcgagtatctcggcaatttcatcacccgaacaccccattactacttgtaacagcagtggctcgcgatactcttctgataactttccaatttgtcgttgaatcactgtttgttccatttcagcatcaagcgtcgtgcttttttcatctacaagtgtgtcattttcaacatcggcgtaatcaaattgtttgcgttcgaatcgccgagcattttctcgtcgtaagatagtgagtaaccaaggtttggctgcttgctgatcttgcagtgaatccaaggcacgccaagccctcaggaaggtttcctgcactaagtcttctgcaatactctgatcacgacataaccaatatgcaaagcgaaaaagctcactgtggtagatatgaaccagtgcttcatatcgcttttgtttttctgtcatagtaaataagacccgcccaccagaaaaaaactttctgaatttatattatttttatataaaaaacggctaattgtagattagccgtttaaattcaacgtattaatattaatcgtatagattctttaatacatcttcttggtttgtcgacttaacgtgcttagtggcttggctaagcaaagccacaatctttgctaaatcaggatgctcgtctgctgaactatagagtttagcgcgtaatttagcaatttcctcattgagggcttgattgttaagtgttgcttgcaggtgctcaattggtcgtgttgtgtgacctgtttgctgtttagcgtaggccattaatgtgctgtagaagagagcattgttgcgttgtttagcgaccttcttaagctcatcaagtgatgttgaagaagcagctactgattgtggtgcgacttcacgtactgttgggcgttttttaatatacagaaccaaagtgactaaccacaggccatagcctacagctgcaacaattacgagccaagctggtgtgctgacttgagtgacagtttgcacagccggtggcatatctgtcacagcggcagagttgtcagtttggggctgtgtaagcgtcgctggtggcggggttaatgggttagtacttggtatcaccgtaattgtgcgtgcaggaagcgtggcataactgatacggtttattttagtattaaaccaaggcaatttgatttcaggtaaagtgtacgttcctggtgtttgaggtaataacgcataagacgctgtttgctgagaaataacgcgaccatcacgcactaagtggttattctctttttgatcagggtaacttctaaaaccttgtacttgtggcatctcgatatcaggcagctgttctttggtgacaccaagcgcggtgagtttgattgtacgtgtaattggcgtacctacctctaccgtgtcatcttttggttgccattgctcatcaaggttgactaattcacttggcagccaagcacctgtgtagttatcaggaattggttttatgtctacatcaacattttcacccatagctgaaattgccatttggcgatagttttgacggatacggccattaaagacaggggctgtaatggtattaatgccgcttttttgtggttgcactaggtattcgcgagtgatcaccaaataacgctttccatcaatcagctcatagctttctgattgtttattgatggcggttaattcggcattttccatttctggtgtcgtaaggttgccatcaagtagctctttattgttgtctatgtatagcttaactgtataaacaccggcttcttgcacatacaaactttgcggtttaatactggttttgataaatgcatcttggctttgttcagagttttgactccgtttgctaaccgttaactcaattggctgcgaagttgcaccagcaacggtaaatgctgggattgtgtaagtcccttctttgcgagtcattaattttacagaccaactcgtttgcttactgatttcaccattaataatgttggtgcgggtactaacgctcgttggtccaacaacaaagtcttttaatagtacagaggtatcaggttgctcgctgttgatggtgtcgtcagcggtaatagttaatatgaaaaactcacctgcaaggactgggtttttatcaacacttgcctgtagttgggtggcagcccaaagcggcgctgccgcgattagcaataaacaacataataatcgcattaccatgatttttcggctcctcgtggacgacgttgatagtttcgtttttgtgcttctaattgcattttatttcttaataagatcgcaggatcatcagggactttacgaagtaactgattaagctgttgtgctttttctttctcttcattagtcagttcagctgcttgtgcctgcatagcttgttgatctgcttgctgtttagcttgttcatcgctttgcgatggctctggctttgcatcttgttgctcgggggactgctctggcttttgttcacctgattgtggtgactgttgtgcttgtgattccatttcaggtttgttttgctggccactttcagactcgctttgctcacctttttgatctgattgttcaccttgctcagagggttgttgcccatcttgctgctcactttgctcagagttttcgccttgctgggaattctctccctgttgcttttgctggttatcttgctggccatcgctgttttgttgatcattgttttgctgttgatcttgttgctgctgttgttgctcttgctgttgcaataactgttcaacgagggcttggttttcttttgcttcagtaaaatcatttttaagttgctgggcttgtttataagcctctatggcttgctctagctcaccagccttggcaagagcattaccatagttatacaaaccagtagctgacttatcttcgctaaaggcgtccatggccgcttggtaattaccttgctgataaagggctgcgccttttagttgcgcgttttctgcttgtgcggcttgttcaaattgattctgctggtaggcatcaagggcgcgttggtcttggtttttaaacacctctggtaactcagcggcgtaaacctgttgctgaggcagtagcataacaaacaaaaccccaagcactaggctgcttcggcgaatcaaaaaaagtgctaacggtagtaaaataatcaggccataaatacccgcatcaacacgccataaagcttggctttgtttttcatctttaagcacttcagcattggcactaggtgcgaatgttttaatatcttgattactggtttgatagagcgcaaatttgccaccactattacgtgcaagtgcatttaagcgactcacatttaattttggaataacaatttgtccttgcatgtctttcaaaaaaccaccctcaggaagcttgattggcgcaccttgctcagtgcctacaccataaatgtttaagcgataatccgattcacttgtaaagcgagcaatatcttcttggtcaagttggtcaacaccatccgttactaaaataatatcgccttcaaggtaacccgcttgtttaagtagctcatttgctttttctaaaccatcaatcacatttgagcctttgcttggcatgatatcagggcttaggcttgggataagattagccaacgtgctggcgtcattggttagcggcgaaatagtaaatgcagagcctgcataagcaaccaatgccgtatcaccttctttgaaaagctcaatcatatcaagtgctttaaaacgagcttgaactaagcggcttggcgcaatgtcggtactgaacatagagtacgacatatccatcacaatgactcgagcgttttttgcttgaaacactggcacttgttttttctcaaagcttgggccagcagaaaatacaatagctaataaggtaaacagcgcaactaaccaaagtggttggctttgttttttgtggttgtcgctcattacaaactgtgccaaatggggggctattaaatcagctggggcgctttttttattgcgcactaacaacacactaaaaataatcaatgctgggattaataaccaaagtagggcagggcgaataaattcaaaatccatactagctctcctgcttaaattggcggataaaactgactagcattgctaagcttattaagccaagcgctataagcagtggaatataaaacaaagaaatttgcgggcggaacgtttgctcatcgctactaataggctcaagcttatcaagctcttgataaatttgttgtaaaccagccacatcttttgctctaaagtataagccgccggtttgctctgcaatacgctttaataagctttcatcaaggttaccaccattcatgccacccatattaaataggctaaaaccacgtgggttatctgagccaacgccaatggtatatactttgataccttcttcgcgggctaacagtagcgcatcttctggatcgaggttaccagcggtgttttgtccatcagttaatagcactacgatacgattactttcatctttgttggcaaagcgttttaccgataaacctaatgcatcaccgatggctgttgctcggccaactaggccaatttgtgcttcgcttagcatttggctcacggttttaacatcacgtgtaagtggtgtttgtaaaaatgccgtatcgccaaataaaataagaccaaggcggtcaccctgacgctgctcaataaagtcacttaatacagcttttaccatggttagcctatcgacatattgattctgataggccatatcttgctcggtcattgagccagataaatccactgcaagcataatgtcgcggccttcattaggcagtgtgataggctcatcaagccaagttgggtttgcaattgcaacaaccagtgaaccccatactgcccattcgagtaatgaaactttacggctatgttgctgcactgtttgattattcaagccaagcttagcaaagcctgggatacgtaaacgtaactgcccttgctgctttagcggcataaagcggcttaataaccaaggaagtggtaagagtacaaaacaccaaggccaactaaactcaaacattgattggctccttgagtttaaagttgtggatggcgctgcgtaatttagccccaagctcggcattattcgtttgctgttgataaagtggcattagttcatcgtaactaaaattgtcgccactaagcttagataagctttctgaccattttgctaaaggctgagaggcaagctggttgttgtaataatgacgagttaaacgttttaaaataatgtgtagctgttgtgcgtcatcatcagccactgttttacttaatttaatggcttgttttttggcttttttaaactgctggtttttatataaaagcactaagccgacaattaataacgaaccaactaaggcgatgataagccaccaaattggagcaagtggccaccatgcaacctcggttggtgcaatgacatcatgtaagccatctagcggatttttttgcattgttactttctcactaattgcagctcaagtggggtggctgcactgaatgaaattaaactaagcccagatttttgtaagcgttttaatctattagaaaacgactcttcagcagacttagcaaaacgctcgcgaaattgcttatccattaacggtaaagccagctcttgaccattagccgacacggtcacagtttgcttaaaagccggtaactgatgctcgaatgggtcgctaatatggcagccaattaactcacagtgtctgcttagcatctcaagctgtttgaagcttgcttcatcaagggcactgaaatcagagacgatataaaccaagcttcctggttttgctaaatgattaaggcgtttaaggttttcgctaaataagctggtggttgtttgatctatattagtcagtgcttggctgtgaatatcacataaattgtgacaaagctttagcactgctttttcgcgcgatgtaggctttaattcgtgatggctatgctgattaaacaccagaccaccaatccgatcaccgcgttgacatgctgaccatgcaaccaatgcgctaatgtgcgctgcttgcactgactttaataataactttgagccgaacagcattgagtttgaaaagtcagtaaatacgaaaacagggcgttctttttcttcttgaaacagcttagtgtgggtttcgccagtacgtgcggtaacacgccagtcgatagagcgtatgtcatcaccggcctggtaatgccgtacctcggcaaactccataccgcgacctttatgaggcgcaaggtattgcccagctaaactgtttttgatttttactttgggcgcaagttctagcaagcgagctttggctttgtaatacatcaactctttgagtgataagtttacgccttgactatggcttgccgctaaccacgccgctgtatcaaattggctcgacatagcttatggtactgccaccaattctaaaatacggctgatcacatcgtctttactaatgccatcggcctgcgcttcgtagctcaatataatacgatgacgtaacacattgtgaagcacagcttggatatcatcaggggctacaaaatcacgaccttcaagccaagcatgagcacgcgcacacttatcaagggcaatcgttgcacgtgggcttgcaccatattcaatccagcggccaagttgctcatcaagttcagacgcttcacgggtggcaacaattaattgtactaggtacttctctagtggttcagctaaatacaaacctaatatcgctttacgggcagcaaaaagctcactttggctaatttgttgtgtcgttgcttgcttatcagagatagcttcacctcgagttagacgtaaaatgtctaattcgtgttcagcacccgggtaatcaatgcttaaatgcagtaagaagcggtcaagctgggcctctggcagtgggtaagtcccttcttgctcaagcggattctgcgttgccataaccataaataggtcagacagtggataggtgtttttaccaacagttacttggcgttcggccattgcttcaagaagtgctgattgtactttagctggagcacggttaatttcgtcagccaatattaggttatgaaataacgggcctttttcaaatacgaactcactggtttgctgacgataaatatcggtaccggtgacatccgcaggtagtaagtcaggggtaaattgaactcgttggaagctgccttcaacgccttttgctaatgcatttacagcacgggtttttgcaagacccggagggccctcaactaataagtggccatcagccaaaattgcgattaacagtgcttgagttaattggggttggccgataatttgcgtgtctaagtatgtttttaattgtgaaaatgcgttaactgccataataaaaagactgtcctaaaagcgtgagtcaaaaattgttttttataccgcacaaacgtgaaacgttcagtgcttatcaatcgtgtttacgctaccgtgaatggggcgctatcaacaagttataaggattcaaaagttataacacaagtgttagacagaaaatcctcaaatagttcgttattttttaaggaattttatcctagcctataaaaattttagcctaccatataaatacagtgtttttttgtaaatcggtcgaaaaaagcctatggttgaaaacttactattggcattcgtacacgggttgttttagaatcaggaaaaacaaacaggtcagacctgtcagcgggagagcataaatgtctgagcaaaatatacttaaaacagcaaaaggcgatcgtatcgcaatcgttagcggcctacgaacgccgtttgcaaagcaagccacagcattccaccatgtaccagcccttgatatgggtaagttagttgtcaacgaaatgcttgagcgactaaatttcgataaatctgaaatcgaccaactggtatttggtcaagtagtacaaatgccagaagcgccaaatattgcccgtgaaatcgtattaggtacgggtatgcctgtatctgttgatgcttattctgtatcgcgtgcgtgtgcgacaagtttccaagccattgctaacgtggctgagtcaattatggcaggctcagtgcaagttggtatcgcgggcggtgctgactcatcatctgtattacctattggtgttagcaaaaaattagcgggtagccttgttgatttaaacaaagcacgcacttttggtcagcgattaaagattttctcaaaattgcgtcttaaagacttactgcctgtacctccagcggtcgctgagtactctactggcttatctatggggcaaacagctgagcaaatggcgaaaacgcataacattagccgcgaagatcaagatgctttagcacatcgttctcacactcttgcaagccaagcgtgggctgatggtaaactgaaagacgaagtgatgactgcccatgttgcaccttataagagctttattgagcaagacaataacatccgtcataactcaacagttgaaggctacgccaaattaaagccagtatttgaccgtcaacacggctcagttaccgcagctaacgctacaccattaacagatggtgcagcagcggtattaatgatgagtgagagcaaagctaaagcattgggttacaacattttaggttatgtacgcagttttgctttctctgcaattggtgtacatgaagacatgctaatgggtccggcgcactcaacgccaattgccttagatagagctggtatcacattagctgatttagatttaatcgaaatgcacgaagcatttgcagcgcaaacacttgccaacatgaagatgtttgcgtcagataaatttgcacaagaaaagctaggtcgtagtaaagcgatcggcgaaattaacatggacaagttcaatgtattaggtggctctcttgcatacggccacccatttgcggcaacaggcgcgcgcctgatcacgcaaagcttacatgaacttaatcgtcgcggtggcggcttagcgcttacgactgcgtgtgcagcgggtggcttaggcgcagcctttgtattggagagtgcgtaatgacagattcagtatttagtttatcagtggctgatgacggagtagccgttgtaactattgatgttccgggtgaaaaaatgaacacccttcgaagtagttttgcagaagatttaaaaaccttacttaaagacgcacaagaaaaagcggtaaaaggcatggtatttatcagtggtaaaagcgataactttatcgctggtgctgatattaaaatgcttgatagcgccaatagccgtgaagatgcattagcgttaagcgaaatgtgccagcaagcatttttcgatatgaaaaagctgcctttcccaacggttagtgctatacacggtgcagcattaggtggtggtttagaatttgctttagcttgtgattatcgcgtgtgttctgacagcgatattactaagcttggtttgcctgaagtacagttaggcttattaccagggggtggcggtacacaacgtttacctaaattagttggtttgcaaaaagcacttgagtggatgcttacaggtaaacaagtgcgtgcaaagcaagcgaagaaaacaggcttagtaaatgattgtgtcccccacagtgtattactagatgttgctaaagagtttgcactcaaaggtaaggctaaggttactaaacctaagctagaccgattaagccaattacttgagtcaaacccatttggtcgtaatattattttcaaaaaagcacaagaaaatgtgctgaagaaaacaggcggtcactacccagctcctttagcgattattaaagcggttcgtgcaagtgttgagcttgatcagttaaaagcatacaaaactgaagctgaaggttttgccacgctagttatgagcgatgagtcaaaagcattgcgcggtattttctttgcaaccactgaaatgaaaaaagagtggcgcaatgatgacgcaccagcaatcgctaaagcagcagtattaggcggcggcctaatgggcgcgggtattgcccatgttagtgccgtaaaagccggtgttccagtgcgcattaaagatgtggctgaaaagggcattagcaatgcaatgaactacagctataaaattttagataaaaagcaaaagcgtcgtattttatctaaagctgatctacaacaaaccatgaatcgcattaccggtaccaccgattacagcggctttaagcacatcgatatcgttatcgaagcggtgtttgaagatcttgctttaaagcaaggtatggtggctgatgtagaacgtgagtgccaagacaacacgatttttgcaagtaatacctcatcattaccaattgcacaaattgctgctgatgcagcacgtccagaaaatgtaattggtctgcattacttctcacctgttgagaaaatgccacttgttgagattattccacacgctggtacatctgaagaaactatcgcacgcgtggttaactttgcccgtaagcaaggtaaaactccaattgtggttaaagacatggcaggtttctatgtaaaccgtatcttagcgccttatgtaaatgaagcggctaatttactgcttgcaggtgagccaattgaaaagattgaccaagcacttgttgagtttggattcccggtagggcctttagcgttacttgatgaagtagggattgatatcggttctaaaattgcgccaatccttgaaaaagaattgggcgagcgctttaaagccccggatgcctttaatcgcttaatcgattctaagcgtttaggccgtaagacaggccgtggtttttatctttacgacaagaaagataaaaaagtggatgagtcagtatacgagctactgggtgttacgccatcacctcgtttaaacaagagcgaaattgctaaacgttgtgttgcgcaaatgctgaacgaagcggtgcgctgtttagatgatggcattattgcaagcccgcgtgatggtgatattggtgctatttttggtatcggtttcccaccattcttaggcggtccatttagctatatggataaactgggtgccgcacaagtgagctcagaaatggcgacttttgctaactacaacccaattttcacaccttgtgatacgttaaaagcaatggctgaaaagggtggtcgtttttaccaagcagaaagcgaagagccggcagttgaagaagctgctcctgtcgatccggttgaagtaactaaagaagtggtcgaagacgagcaagcgtcagaagaagctgatacagaaacgactaaaagctaattctttaaattagttaattttaaaagccctgctcacgttgagcggggctttttgcttcgatattggccataagtggtatttaactcgccatgtcggtttgttataactaggtttatttactaattgattaatcaccatgactctcaccactgagcgattaaccttacggctgttaaatgccgatgactggccattgttttatactttgcataatgatgcccaagtaatagcgaaatgctttgataagccgtcagaagcgcagctacgcgctaagtttaatgaacgtttaaagccttggcagccaaattcgaatacaccactgtgtttagtgattgttgaaaccagcacaggaaaagaagttggcgtgactgggtttacctcatcaactgtccctgagatacaagaggttggttatttgctgttgcctaactttcatggtcgaggctatgccactgagtctttgcaagcggtgctcgattatgccgcatcagaacatgctgtacgtgaatttaaagcggttgttaccgaaggtaatatcggttcagaaaaagtacttgagaagtgtggctttcagctgattgaaaagcaacctgacgcctatgcaattggtggtattttgtatgccgatcatcattatcatttaagctgcactgatcacagagtgtgatcagtgcaaaacttttacagatgaagctcaatcgcttttctgtctttttctggcatattcgcaaccactaaattaaacgaattatcgatcattcgttcaatttctccttgtggtacggtgccatctaaaataaccgtattccataaacgtttgttcatatgataacccgggatcacagacgggaaaatatcacgtaatgcttgagcctcatcagggtcacactttagattaagccaccatacaaggttgccttcatcatctgtttgaccttctttgccctctgcgagggtagcaaacattttatgattaactttataaacatcgacatcttggccaaatggttgtgtgatcatcaccaatggcttgttcattaaatattcgtgtactgcgtgttgattcatgatccaatccttgaagtcatttttcgtagttataaacatagcagctttttcgtagtttggagacaactattgccataatttgctgaaaaataggataaatcacagatgtgatttaaaactataaatttttattgaacaaacgctattacgtggtaaattcctgtcatcaaaaaacgataggaatacacccatgcctaaggcaagtgaagttaaaaaaggcgccgctattgagcataacggccgtgttttagtagttaaagatattcaacgttctgtaccgcaaggtcgtgcaggtggtagcttataccgcatgcgtttatacgatgtagtaacaggcggtaaagtggatgaaacattcaaagacagcgacatgctaaagctagctgacttaactcgccgtgaagcaatgttctcttacattgacggtgaagagtatgttttcatggacaatgaagattacacgccatataacttaaacaaagaagcgattagcgaagaaattttattcgtgaatgaagaaactcagggtcttcacgtaattgtaattgatggtgctccggttggcctagacttaccatcaagcgttgaacttgttgttgaagaaacagacccttcaattaaaggtgcttctgctagtgcacgttcaaagcctgcacgtttaactacgggtttaacgattcaagttcctgagcatatttctacaggcgaccgaattcgtatcaacacggttgaacataaatttatgggccgtgctgagaaataatagcacttactgatagaaaccggctatttgccggtttttttgtgtcaaaaaatagtatttcagtgttttattaagcgacagaataaaagtttgctcctacaaaggcattgaaaaagggacagaaaagccgcatcattaagggcttacgaaaacaataataatgctagttgtcgattaatgttaaaccacggattggaaaacagagaatatataaaacttcccgaaggcgttgatatcgccataactcctgctggcgttgttgcccgaagctacgcttaccttattgattttattatccgaggccttgttttaattgctgtgagcagcgttttggcatttttaggtgatgcagggcaagggcttattttaattgcttactttgtaatttcttgggggtacaacattctttatgaaatggagaatggccaaacacccggtaaaaaaagacttaaaattcgtgttgtgcaagataatggcttacccgcgagcttttcgcaaatagtggtgcgcaacttattacgccccgcagatatgttaccgataggctatttcttgggtcttgtggttatgttgtttaacaaccgtttcaagcgaattggtgattgggctgctggtactatggttatttatgaagacgagttagaagcgcgaccagagctgtcgaaaggccaagtgcatgtacctacagtaagtttaactaccgaagagcaacttgcagtgctggcttttgctgagcgtcatgacgagttatctgatgctaggcgccacgagctagcgcgtattctcgcagagtcatttgcgacagatgaaaacaatattgagtggcaattgctcagttatgcgcgccattatgctggacaagtcaatgataatacagattacccaccgcaagagggtaaaccatgaaacaaactcaatttgtaaagtcgaatagtgaacgctgggatgaatttaagactttgtgtgaacaaaaaagtacagagactttacctattcactttcctaatttgtatcgaaaagtgtgtaatgacttagccattgcgcaaagtcgtcaatacagccccgtgttgattgagcaaatcaatagactcgtgcagttagggcaaaagcgactttatttatcgcgtagtaatcaattttctgaattatggcacgtagcacgcacagcatttcctcgcgccctatatgaaaaccgtttaatgcttggtattaacttattggcattttggggattggctcttattgcttttatttgggtgacacttgacccggatgccgtctatacatttttagggcaaggcaccgtccttaatatcgaacaaatgtataaccccagtggtagtgtacaatcggctgagcgaggtgcatcacaagatctcatgatgttcggggtctacatttacaataatattggtattgcatttcagatgtttgcaggcggtgtgttgttctgtataggcgctgcctttttcttattattcaatagcttttattttggggctattgccgctcatattgttaatgttggttttgaagggccgtttttctcatttgttatcacccatggctcgtttgagttaaccgctatcatcattgcctcagcggcaggctgtcagattggttacgggcttttaaatcccggccagtttacccgtgcatatgcgatgaaacaggctgctcaaaaagcactcccactgattgttggggcgtttttaatgttggtgatagccgcttttattgaagcattttggtcacctcgtgatattgcctatgaaattaagtatgttgttggcgcaggctgttgggcttatgtgatttttcgcttatataagggtatgcgttatggagcttaatcacctaagctttaaccctcgtaagcgcagcgcctacgaaacctttgatttagcggtattactggttaagcaacactttgtagcattggtagctatgtatttaataatggctgtcccggtgtttttaatgattggcctgttgtttaattggggaataagtgcttttgttatctggtggctcaagcctctatttgagcggccattactggattacatgtcaaaagcggtgtttaatcagccgctaagtattagtcatagcttaaggtcagtgaaacagttaaaaatgaccgacatggtcgctcatttaacgatatataggcttagcccaaatcgtgcatttttagcgccagttgagcaactagaacgactttcaggtgagcgaaaaaccaagcgtaagcaagtattgtttgccttaacgaagcctaagcaaacactatggatgctgttttgtgtgcattttgaatacattttgttgatggggatatcggcactgactatcgcattaatcccccaatcgttttctgccgaagaggctatgtaccaaatttttgaatctccagagtggctagagatagcttttaaccttatctacataattagtatttcgttggttgcacctttatttgttagtggtggatttcttgcttatttacaccgccgtgtagagcttgaaggttgggacattgagctggcatttaaaaacattcgtacccgcctcgcaggcttactcagtgctgcagggctatttatgctaacaatgtttaccctgcaaccatcaactggttatgctgagcaaatcgataagcaagcgataaaagagcaagtcaccgcactctataatgagcctaatgtcatcgaaacagaaaccacctgggtgccaaatttagagcctacagagagttcatcacacagtgattggtcatggcttatcgacctgtttacagcgataggcaatgggtttggtgtattagtttggctgttagttggattattactggtttggctcgtttattacttgattaaaaaacgaggtttttttgccaacttaagcttacctgagcgaacaaaagtaactgaagagtcagtgatcccaaccttatttgcagagattaaaagtaaagatttaccagcagatttaatagctgctgcacagcaatgctttgagcaaggtgagcatcgcttagcgttagcgtatttgcttcatcataccctgagttgggctcagcagcatcaccaagtgcgcctgcaccgctcgatgactgaacgcgaatgtaaacgtgcaattgatgcaaaggtgccaaatcaagggcaagcgatatttgcccgcttattttctgcatgggtcgcggttgcttggggtcataaaacccctgatatcaattttgtagagttaactgcacaaattacagcaatgacagcaaatactcaggagcaagcccatgaagcttaaggttgtgctaattgctctattagtcttgtttaccgtgtttattgttgcctcactggcctcattagattgggaaaaaagagaagttgaaatagggtttcattcagatgttgccaaagataacttcaccatggcccaacgtcttttaaaggccaatggaataagttggatcaaagataaacacttggctgaacaagcacaaagtgaagagcttgcgatagatccaaaaagcattttaattttagatgaagccgtacttgctgactcttatctgcttgatactcagcttgctgactgggtcgctgatggcgggcgtttaatttatgtattaaataggcagcgcgaagagctagcaatcgataattcagtgttctttgggcagcttggcatcaatgtgctaagtcaagaagatgtctttgagtatgattttgcgatgcgcaaagagggggataaaaacagtgtgttgtctattgatgaaaatactgagctcgaacttgaattaagccgtgccttttacatcgaaaactgccctggtgtaagtacaaatacttctgagggcaaaaccgtaatgtgtgattttgcctttggtcaaggcagagtagttgtgatgccatcgttattaccttttactaactatcgtttgcgccacctcgaccatggcagtctattactttggttaagtaaaggcgctaagagtattagctatgttccgtacctgacttaccctaattggcttgcaaagctttggcactggagctggcaatttgtagtgactctagtgttattaattgtgcttgcagtgtggcatattacgagccgtattggccgagcatacgcccctgattttgaagctaaaaccagttttaatcagcatattcgtgcactcgcaaatttttactctgagcacggccatgaagccgtattatttgccgcactcaagaaagacttttacagcaaggtagaagcgcgtgtaccaaactttaaaatgctgagcgcagataaacaggcgcagagtattgctaatttaacccattttgaaaaacaacaggtagcgcagctattagctagcaagttacctgactcaaaaacacaaagaacaaattatataaaacgatttaaacagttaaggaatgccttatgagcacggaattagacactaatcgcatgagcttagttgaggcagctgatgcagtaaaacaagtaaagcataacatttcgcgtgtgttagtcggtcaagatgccattgtagaagatgtgcttaccgttctttttgcgggtggccatgtactgcttgaaggggttccgggacttggtaaaacattacttgttagagctttagctaaaagcttaagtgtaaatttctcacgtgtacaatttaccccagacttaatgccttcggatgtagtagggcatagcttgtatgatatgaagtcaggtgagtttaatatcaaaaaaggccctgcctttactaatatcttacttgctgatgaaattaaccgtgcgccagcaaaaacgcaatcagccttacttgaagtgatgcaagaacaacaaatcactattgatggcgaatcgttattaataaactccccgtttatggtattagccactcaaaacccactagatcaagaagggacttacccattaccagaggccgaattagaccgctttatgatgaaagtagagcttggttttccttctcatgaatcggaagttgagcttttaaaactgaatacacaaatagtttctaatgaaagcaaagtggagcagcttcctgcggtattagatgccaagcgtattgctgaaattaaacagctttgtgcggatattttagtagatgagcaaattcttaattatgccgttgatatagttcgtagctcacgaacttggcaaggcgtgctgcacggtgcagggttacgtgcctcaattaatatcattaaagctgcaaaagtaatggcattgatgaatggccgtgattttgttaccccagatgatgtgaagctagtctcgccaaatattttaaggcaccgtttaattttatctgcggacttagaactggaaggtgtttcgtttgacgaagtgatcagtgctattttagccagtgttgaagcgccacgctcatgaaccgtatcaagcttaggccagcaaaacgtttagttgtgttaacagcattcattctgttgcttatgcttgtgtgtgctattgctcagttcaatggcatgcttttaaccgccttgttattggtgccagctttagttgcaattgttgattgcttggcagctaagtcatcgcctttactcgaagtaagcgcagaaactaacctaaatatggcgttatacagacgccaagatttaaacgtgttgattaaaaataatgccaaacatgctaagcaattagatgtgagtgtgcatttaagcaacgctattgaattgttaaagccagtgcaaaccctattcattgacgctacgcaacaggcaaagctggtctttatgatacgcgcccataagcggggggatgcacaaattagtgcgattgagctgagggtagggtcgccactaggcctttggcaagcaaattggttggcaactcaagctactcagttaaaggtttacccagactttagccgtgttacctcgaaacagcatttaaacggggtcgtgaataagcctatttcggggttaaaactcaccaaaaagcgcggtgatggtattgaattccagcaattacgcgaatatcgccaaggtgacagcgtcaggcagatagattggcaggcaacaagtaaacgccgaaaattaatttcgcgagagtatcaagaagagcaaaaccagcatgtaatagttatgcttgatgcctcaaagaaaatggccatagaagccaatgaaggcagccactttgatcatgctttaaatgcattattactactttctcacacggttttaaagcaaggtgattggtttagtatgcagagctttaataaaaacctacgctggttacccgatgttaaaggcgcgcagaatgtatctcgggtgatgaatcatttttatgatttatacccagataatagcagcagtgactatttggtcgctgtaaaccagttaattgctaagcgcagtaaacgctctttagtgttattagtcaccaccctagatgagcaaagtattgacgagttaatgcctgcaataaagctattgcaaaaacatcacttagtggcacttatcaatattaacaatcgagccgtgagtgaagtgctcgaagagcctatagaaaagtatgaagatgcaaccagttactgtgcagcattagcactactaaattcacataaagccaatatggctaagctgaaaaagcaaggggtgatagccatagactgtaaccctgagcagctgttaccgcatgtgcttaatacctatttgaatgtgaagcactcaggggcgttgtaatacccgaataccaagcggcaataaaaaaggcattgaattcaatgccttttttattaattaacgaaacctatgaaacgattacttttgattatcaatggcctcattaattttgtattggaaataaatcgcataaaagaaaaacgtgagtatgccacttaaatgtaccggctcattgctgccttcattaattaactctttgagtgaagtacgtagcgagaaaatgaataccagaccaacaattaaagaaataatagaagcaatagcagacaaggcttcagaaatatcggtgaatgccaaaacaaagttgattacgtaaatagcaacatagccataaattaagttttgatttacctgatgtttagcaagtgcgtttgctttgtttgcgcggcttactagccagtataaggcgtagatacctaatgtgataagactcaaaaagaatacgccccaagcagagaagcgctcaaagtttaaaataggtttattgccacttgtatttgcttgagttagctctgcttcaggtgcttcatatacatttgttgattcttcagacacaacggatcctcatttttttgttagttccttgattacaccaatccgcaataatacttaatcattttgagggattaaacctgtcgctatctgcgttaaaaatttctcatttagaacaactaaataacgaaatttttgccttgctatcaaataggttttattgcctcaaaatagaccacttaattaagcgaattggtattagtttgttcctatattagtaaattgtaattatttagtacacattaattgttgctttacctagtaaaaataataaaaagttcgttgtataaacacgcgttatgcagactatataaagtgtgaagttccaaaagctgtgtgaattatgtacactgccgctgatttttaatgaggtgttgtgtgctatttgttattttaagctgtatgtttgttttggtgatgtatttagagtcgttgtctaaagggatgccagtaaagcgttggatgcttctcggtggaatgcttggcccaattgcgtggtgtttgtttaacgtacattatcgacgtgcctttattcgtcatatcggccgccaatcatgtggctggcgaccttaggcttctacgcttcttaataaacttggcgcagacttatcgagctggctttttaaaaattctgtaaattcgggctgtgataacggtttagaatagaaataaccttgtattgtttggcactttaattgttctaacattgtcacttggtcagcttgttcaaccccttcagcaactacatgtaaatcaaggttatgggcaatggtcacaatcgagtcgaccatgttgcgaccacgctctgattgcatatcatcaataaaggctttatcaacttttaaggtgttaagcggaaattgctttaaataggccaatgatgagtaacccgtaccaaagtcatccattgctaggtgaataccacgagcgcttagtgagcgcataattgttatcgcttctttagggtcatccattaccgtaccttcggtaatttcaagttctaagaaataagatggcagctcatttttttgtaaaattacatcaatgcgagtggtcaaatcaggtaagctgaattgtttcgctgataagttaaccgcaactcggccgttaaataagccttgatcaatccagttttttacatcacgacatgctttgtttaataccacttcgccgatttcgatgatttgcccggtttcttctgcaatagggataaatacgcccgggcttataatgccttttttcggagtaataaaacgaaccagtgcttccataccatctagtttgccagtgcgaatattcattttcggctgataatagacttcaaaatgatcttcttttaagccgtagcgcatcaagttttcgatttgtagccttttgacggcttggcggttcatcgtgtcgttgaaaaataggtaactattcccttttttcttggcatgatacatggctgtatcggcattcttaagcaataactctggggtattaccatcttcaggaaataacacaataccgacgctcgatgtgatcaccagctcatggcctgccatgttgaatggtgtagctatcgccgctaaaaatagcttagccatacgggtgatggtgtgtatgtcgttggtacccgacatgaccagtgcaaactcatctccacctaggcgataaaatacgtctttttcgcgggtaagtttattcaaacgcatcgcaagcttagacagcaagctatccccaagttgatgaccaagtgagtcgttgatctttttaaagttatctaaatcgaaaactaacagggcatgatggttatcttgcttagcgagcttctttaaattcgtgaagaacagatttcgattaggtaagcctgttgtgcggtcacggtttgataaattatgaagttgcgattcggctttttttcgttcagtttgatctgagaatacaaccacataattacaaatttgattgtgctcatttttgatttcatcaattgaaatttcaatgggcagtagctgtcgcttggcgtttctcagtttgacttcttgttgccaatgttcagtggctttaacagtcgctttaacttcatctacataactttggtcataaccattaagcatgaagtctttttttaggtattgctcgcggctgccaccaaacaaggttaaaaagcttgggtttaaatcgactaatttgaagtttttatcgtaaatagcaatcgcgtcagttaatgactcaacacatttagcaaataagtttaagcgtgcctcagtggactttagttgcgaaatatcccgcacggtgccagtcatgcgtaatggctgtaagtttgcgtctttttctataatttttccgcggtctaatacccagtgccaacggtcaaaattatctttaatacggtaacttgcttcgaaaaaagcagtgtgttctgcaaaatgtttttttagtgctttttctacttggtgaacatcatggggatggataaggtcacgattaggagggaaggcgctggtattattagtattcgcggtgtatttgtcgttaatacgtagcacttcgcctgtttttatattccaatcccacaatgtatccccgcttccctctacagtactttttagtcgatgttctgagatacggagttgatggcgagagcgtttgagcttgaaaattataaataataggtacggcaataataacaacatcaccccacttggtattaacagcaaagttgtttgctcaagttctatggggcttgcagcggcgctaaaaacgctcgctatacttattgttagaaaagcagaaatcattgttattatttttgtcattaatgcattaccctaattcgcatcagttaatttaatccaagctgacgaatgagtcaaagagaatgcgaataaagggtggtttttgctgtctttttagtcttaggttcgcttaaaagttctattcttgggcgttcatcgctgaatatctctctcacatattgctgcatatcgctcagacttaatgcttctagggcagttaaaagttgctgctgcatgttaaaatcactgtcgcgattacctatggctagccataaacgctgtgagcgaagacgcaaatttttgtctttttctgcgatatgagtcactaagcctgcttttgtatcaagccattgttgctcactgatttgtgagatctgtgttacataattttcaataaactgcttatgacgttttaaaatttcatcagcgctatgtttaggggattgcacataaaaagcgataccagcgcgggtattgaaaggtgcgtaacctgcgcctaccaaataacctagctgttgcttggttcttaattcattgaagtaatcttgattgatgaggtggttcaacaacatcatttttactttttcttcagtcgcatcggtttgagcttggtaataaagaaccatcgcatggtcattacaatttaaacaaaagcgctgctgcgatacatccgtaatagtagatagaggtctggttaaatcaataatggtattgctgccagcgaggtgctcagcgatttgtttttgaaatttcaatgcatcgctacgctgccaattaccatgcaaaaaagactctacatgcaatgctttgaaaaactcttctctaaagcaattaaattgatgaaaactcgtatcttttaaagcttgtgcaagcgcatttggttctgggttccaaggcattatctgtgcaccaaggatactaaataattcacctacaggtttgttttggttgctgtttcgccaatgcctaactagttgctttttatattctgcaaagcgttttgcgcagatctcaacattaaagagtgcttcaagtaactcattaaccagctctaactgactcgatgaaaggcctgcagtatgtaaggtcaaaccgccttggtgagaggttaaatgataactaaggcctgccagttctgctggataaaattgttcagcgacactgtccataaataagtcggcaaacaaacgtgtgagtgccatatgcttaacatcttttatcgcaaaggaagagtccattgctaaataaaaatgcccctttgcaacacgaaaggttgcatcttgcttaaaccaaaaatcaaaaccttcttgttttacaagtaattctggtgtttttgttggcgcgtctaaggggagtaactcaacctctttattaaggtaaggattcgcgcttggtaagcacattttaggcaggggggtgtttatttcgccgagtgcttctaaccagcaaggagaaatatcctcaattttataaggcgtattgtaccatgctgtcgtatgctcaggttcgacacctgggtgaattaacactaagcgcatattgtctggtgtaagccattgcatagcaatttcatgggcacactgattaaagccttccataaggtagtcaccctgaacatagttagcttcatcataatgctgcatgttaatgcttaaattacttacccaatcaattaagcgtgctttttcttgattatcaaaggcgatttgcaagaggttctttttatcttgataaagacgcggcaacttatcgcagttttggttaattaagcagatatattcaaacaccatttcgacgatatcttcatagtattcaataccttcatctgtcaacgccatgctgatgttaaagtctttgaaattactgccattgataccaccacctgcagaaagcgcgttgatccaaccttgctctttcaaaattgaatacagcgaacctttgccttcatagccgagtaaatgagcaataaaactcaccgttttgtgacgataaaagtcatcaatgttcggcattgcaaaacttataattagcttttgcatatgcttgtgtggctcaatatgcagtactttacctaagtcttgtttgcgataaagaggctgctcaatgatcgccttacttttttgctgccctttaatggcgctgaaatattggcttacccagtcgctcattgtggcaatatcttcgttactgcaaatgactaaagtcatccattgtgcttggtagtggcggtcaaaaaaggcacgtaattcatcgctaatacaaccttcacgatcggcaagtgtttgttggttaccaaccgagaacttagcaaaagggtgagcaggattaacggtttctttatgggcttggtaaatacgacggccatcgtcttttatttttaatttaaactctgcatcaatcgcatttcgttctttagcagtttcgttagggcttaataatggcgcaataaaaaagcgactaaattgagccagagcttctgaaaattgttggttattgatatcaaagaaaaagcaagaatgctcagtgcctgtccatgcgttggtactgccacctgattgtgaaacaaaattagaaaacccgcctgactctgggtacagatcggtacctaaaaaaagcatatgttctaaaaagtgagcgagcccttgtctatcaagaggatcgtcaaagtgaccagcgtttatcgccatagaagccgcggattttgttgactcaaggtcttgcaccaagagcacttttagaccattgtccagtgttaggggctgatatgttctgttatcattgcggctgatattcaaaagatgctcctgaaagaatgcgttaactcgctaacaacagatgataacttcaggaaggctaaaaatggcacagcaatgaaaatctacctgaatatcaataagcggatgtttaatgtatttagtgatgatattctaatatagctaacaatcaagcaaactggctactgttttatattctttaatcggttgattttttatgaaaacaatcttaatcatgcgccatggcgaagcaacgccaatgcaagcagatgatgcagcaagacaactgaccgaaaatggtcatcaagaagccagtagaatggggcaatggttagcaacatattataaaccagatgctctgttggtgagtccttacattcgcgctcaacaaaccgctactgatgcaacgcaaaatatttcgttacaatttaatgaaacttgtagcgatattacgccagatggcgtgccacaagttgctgctgattatttagaaaccctcattgctatgcatcctcagtgtaatacttggttagtggtagcgcacatgccaatagtcagctatttggttgatcagttgagtcctggccacatgcctattttcaatactggcgcagtcgccgtaattgaatatgatgagcacaatcagcgcagttactaccatagtattcactcaccaaataacgtcgaaatataacagtggatttgctaaattagcgccactgttaattttttaagtccttactatgacaattgaacgcttacaaacgggtgcgcgtatgagccgcatcgttaagcataacggcactgtttacttatgtggccaagtgtgtgctgatgccgaaaaagatatcactgaacaaactcaaactatgcttgataaagttgaagccttactaattgaggcaggtagtagcaaagagcatatgttaagtgccactatttatctgaaaagcatggaatattttgccgagatgaatgctgtttgggatgcatgggtaccccaaggccatgcacctgctcgcgcttgtgttgaggcaaaaatggcgcgcgatgcgctattagttgagatttctgttgttgcagctgttaagtaacgagcagcgaattgcgcagttgattgctcgctttaatgagcaatctgggcgcgcaattgttcaattaccaagttggcatttttgtgataatgagcaagatgccaatgactgcgcattgctggttttaaagggtgtaaaacaagcaacaaccccttcactttattggtttaaagccaacaatgaagcccttcctgaagtgggtgatttggccatttttaccaattggcaaggacagccgctaggtattattgaaactgtctctgtaaccattaccgcatttaatcaaataagcgcagattatgccgcgctagaaggcgagggcgacaaaagccttgaatattggcaacgcgtacattgggactattatcagcgagaattagctggcacaggctatcaatgtcaccccgatatgcctttagtgtgtgaacagtttaagttaatttttaaggagtgagcatgagttcaaatcctgtggttcttatcactggcggtggacgaggtattggtgccgcgacagcaaagctgtttgctaaacatggctatgatgtgtgtattaattataagtcagatcaagcaagtgcagagcaggtagcccaacagctaaaatccctcggtgtgaattcgtacttattacaagctgacatcgcagatgagcagcaagtaatcgccatgttcgccaaactcgatgggctggttgcgcgcttagacgtgttagtgaataacgcggcgatgatgatgccgcaaatgccgttattagagatggatgctaagcgaatcaacgctattttaagttgcaatgtcacaggggcatttttgtgtgcgcgagaagcaattaagcgcatggataaaggcagtattgtgaatgtgtcatcgggtgcgtcgcgaaccggctcgccaaatgaatatttagactatgctgcatctaaaggagcacttgataccttcactattggccttgcaaaagaagtagcgagtaaaggcattcgagttaatgcggtaaggcctggtcttatttataccgatatgcatcgtgatggtggtgaagcaaaccgcgtcgatcgtttaaaatctaaattgccgctggggcgtggtggagaagctggtgaggtcgcttcagcgatttactttttggcaagtgagcaagcatcatttacaacaggcagttttatagatgtttcaggtggtttataaaaactaaagtaaaatagttaaccaaacactaaagctcactacactcaacaccgttgaaagcacaacgctacttgccagtgtcgcctgatgttgtttaatttgattagcaattaaataagcgtttacacctaaaggagaggcgcttaaaagaacaagtactttcagcagagattgctccaaattaaaaacatggctagcaaaaaagtatacagcacaaggtagaacggcaagtttgatgatggtagcaataacggaggcttgccagttgtctgcaactttatagaacaccaaatttgcccctaacacgaataacgcacacgcaatggcgggtttagcaagtaagctcaggccatttgctaaatcatcaaaaagtgtaaaaccaaataggttaacagcaaggccactactgatactcaacacgactgggttcagtagcatgtttttagcaaacgctcgccaagagaatgtttgctgcgacttagcgctgagcaaaaaggtgagggtaaacaataatgcgctgtgaaaagtgatgatcataaacacaatgccgaccatttgctgtccaagagcagcaataataataggcagacctaccagtacggtatttgagtaactactgccaagagcaaatacagcgtgacgcgatggtgcagattgcgttgctataaaataccggtcaatcacgtagccaagggcataaatagctaatactggaatataaaaacttaaaaagccggcaacagaaacactattttttaaatcggcttgtgccatattcaaaaatagaaaagcaggcacgctaatgtaaaaggtaaacttgcttaaccctgctatgtgctctttcgataaaaacttgctacgcgagctaatgtaaccacttaaaacgataaaaatcagtggaaaaataatcgaaaaaatatgcacattaggccttatgataagaagacgttagcgtctgaactcatcactttgtggaagattaattaaaataagtaccgcacctttaccgccaaactcaagaggtgcttgatgcatcgcaattacatcagggtgttgtactaaatattgtggcactttgtgtttgagtatgcgctcaccaataccatgcacaatacaggcacaatagtagtgctgttttttacactcatgaattaatccagccagctcatctttggctaactctttatttaagccatgtaaatcaagggttaactcaggcgggtaatctccacgacgaagttgctttgccaaaaagctatcatgacctggcttgacataactgacagtgccatgagtgtcgatgtctggtacatattcatcagaaaagaaaaattctgcctgatgttgctttttttgctgggaaaattgcttcgcttgtgacactttaggcttattggtgaatcgaatagtgtcttgtttaaaggctttggcaccactaatactctgacgaaataaatcaatatcgtcagggcttatgtgattgttggcgtggggatcttttttcatggcggcagtctaaacaaaaaaacgctaaaaatcgagtaaaaaccaactgaaaagacggtacaatacgcgtcagaatagactttgaaagttaaggaacatacatgaaccatttccagattgaagatgcaattttagacgaggcaattgcagaactttcaacgttgcacgattggttacgttggacaaccagtcaatttgccagcagtggtattttctttgggcacggtacagataatgcgtgggatgaagcagttagcttattattacccgcattaagtttgcctatcgacgcgccaaaagagctaatgcatgcgcgtttaaccagcaccgagaaaaaccgtttagctgaactaattgcagagcgtattaatgattgtacgccagtaccatacctgaccaacatagcatggtttgcaggtatgccgttttatgtcgatgagcgcgtgttaattccacgctcgccatttgcagagctaattaacaaccgctttgcaccttggttagaagagccaagctcagtaacgcgcattcttgatttatgtaccggctctgcgtgtatcgccattgcacttgcacaagcatttgaagatgctcaagttgatgcggttgatatttcttatgaagcgctcgaagttgctgatattaatattagcgattacatgctcaatgaccgcgtactaccaattcaatcagacgtgtttagtggcgttccgggtcaaaaatatgatctgatcgtagcaaacccaccttatgttgatgctgaagatatggctgatttaccgcgtgaattccaccatgaaccagaacttggtttagcatcgggtcatgacggcctagacgtaacgcgtacaattttagctgaagccgctgaacatctaactgataacggtttgttatttgtcgaagtcggcaactctatggtacatatggaagcgttatatccaaatgcaccgtttgagtgggttgagtttgagcaaggtggattaggtgtgtttgtgatcagcaaagagcaactagttaagtattttgctgactaacggcagattttaaaagccgagcctgagggctcggtctcagtagtcattaggaatgaggaaagttaatggcaggtaatagcattggacaactatttaaagtgtccacctttggtgagagccacggcgttgcattaggcggcgttgttgatggtacaccagcaggccttgaaatttgcgaggccgacttacaaattgatttagaccgtcgtaaaccggggcaaagtcgttatacaacgcagcgccgcgaaagtgacgaagtaaaaattctttcaggtgtattcgaaggtaaaaccacaggcactagcattggtttactgattgaaaacaccgatcaacgttcaaaagactacggcaaaatcgctgaagtgtttcgtccaggtcatggcgattatacctattggcataaatacggtatccgtgattaccgagggggaggtcgctcttctgcccgtgaaacggctattcgtgtagcggcaggtgcaattgctaaaaaatacttaaaacagtttcatggtattgaaattcgagcatgtttgagccaactaggaccaatcaaagcagaagactacaactgggatgaagtagaaaataatgcatttttctttccagacaccagcaagctagaagcgcttgatgagtacatgcgcgacctaaaaaaacaaggtgattcggtaggcgctaaagttaaagtggttgctaaaaatgtgcctgtaggcttaggtgagccagtatttgatcgcctagatgcagagcttgcacactcattaatgagcattaatgcggtaaaaggcgttgaaattggtgatggctttgatgtggttgagcaaaaaggctctgagcaccgtgatgagttaactcctgatggttttacatcaaatcacgcgggcggtgtacttgcgggtatctcaacagggcaagatatcattgcctctatcgcacttaagccaacctcaagcattactataccgggcaacagcattaataccagcaacgaagcggtagagatgatcaccaaaggacgccatgacccatgtgtgggtattcgtgcaattcctattgctgaggcgatgatggcgattaccttaatggatcacttattgcgccaacgtggtcaaaacccacatgtaagccacgaacatggaccaatcaaaggttcgattgattaatttggtttgatttagcaaagaactataaacttaaaacgcggcttgatttgccgcgtttttgattgcagaaggtcaataaagaaacttaaatacgatcaattgcctgctttgctaccatgtatagctttttgatcattaaacctaatacccaacgaataaattgagcggtaagctctttgacttcatacgatgctttaccaacaaacgcgagcatatggccaattaacccttttaattcttctgtaagctcgacaaatttaaccactgattcatataggcagcgggctaaaatatcataaaaagttaacccgacagttaaacctgcctgtgcagagatgaaggcgtattgtcctgttttctttaaaaaagtaattaagccattggtaattactcgctgccagttaagcgagaatctaacattaaagcgctgatcatactttaaaacagtatggttgtagtgaaggggcttaattgagctttccatactggcgtagtcttgataggcttcaacagtattagcgtaaccaggagcatccccctccatagaatgagctgcaatattaaaaaatgcgccctcattcattgccgtttgatattcgctagatgtatggctaaaaggccaagcaggcacgcatgggacggggtctgcgccatgtgtaacgcgatactggccaatattatgcgcggcagaatgtacggagtggttcaatacaacccgcggcgcaccaaaggtatataaatttacaggaatgcctttttcacttgcccaaattgccgtgagttgtgcgattgcaccaccaaggctatgcccaacaaggtgcaagcacttaggtttatgactttttacataagcctcaaacatgggcttcatactggtaaatgctttttcgaaaccagagtgtacctctaagtttttaggtccatgggtaatggctacatttaaattggttagccaatcagaacaggaggtaaaaacagttccgcggatacctataatatgatggcctttaaattggggggatgcaccttctgctgttaaggcaaacccagtactgtgatttagaagttggttaattaagccaccactgacgcctttgatttgattgctggtgattttgaaactgctgtcaaagttttgcccgaactcttctttaaaagatgtagattttcttatatcgtatactctactagctattaaagcagctatattaggtggtagaactgttttgactttttccatgtcaatcttccttatatttcagttaaatctgttaggtcataattatttattcggtattgtttaccattctttaaaagcttatagggtagaaaatcttcttcccatctacagatgctttgagctacgaagttacggtgcttatttttttgatttttgaactcaaatacaacatgaggagcggtcatctggcagttcaagaatgacagcttcttgctgtactctggaatttcatcaatcccagactgagttgcaacccataaaggagttagctcattatctctttcaataaaaatttcttgagaaacacgatgctcagcaatcaatttattaggtattgaagataaaattgttttcttaggaaagtgaaagcacccgttttcatcggttattgcagtgtcgcgatgaactttttcatctatgtagattaatgagcgaattatctctaagttagcaacaggttgaccattttcagtcacaataccattgacttctgggcttaaaaatacttcttttttctttctgaaccagctaaacatatcgtctccttgacctatagctgtggaaataattacacacgcagagagagctagaataatgtgggtaattttgtttgtaattgattttttcataagcaatccgtgcgtatttagggaacactaatagattgaaaaacagatgtaaagttgattgttccttttttatgcctattagaattttaataaggggagtagactgtgtttgctatcagtccacattgccagctcgctatgtgggtagcgtttaataggcgacaaatcactgatagatacacgatttaaaaaagcctgattatcagttagcaccacccagtctgagcctatgtctgatgggctatggccttgatagctaaactttaacatagccttattaaagtgttggctatgtgcctgtaatacaggcagtaagtcgatatgattatttgaaatatgcacaatcaatacgccatcttcattgagcctttgccaataaagtgacattgcttcttgggttagcaaatgtgcaggaattacatcactggaaaatgcatcaataattaaaacatcaaatacttcgttcgcattattttttagcgcaatacgaccatcccctaagctgactgtgagcttggcttcactgttttctaaatatgagaaataacgctttgccatctcgtacacagcagggtttagctcaaaaaagtgaatactatcctgttggtctgcaaaccgagctaaaacgcctgcacccaaaccaatcacgccaatgtttagtgcgctgttttgctttagtatggcaagtgatttagcgacaccagtatgctggtggtaataactttgctcaaactgttggtttggatttagtggctctgagccatgaatcgtggtgccgtcaattaagcgcctttcttttattgattgagtgtttatatcttttaccgctaaatagccataaaaattgcggctagtggcaatgttatattggttaaagtttacagctaaaaaacaatagcatgctaaccaagtaactgagctggtcatgagagtgaatttgagctggtttgtctttgttttagcttttaattggtagtaacacacaaaactaaagataaccgctaatgtaagtaaatactcgtcaatctggacaaatagcaatggggcaacgagcgtactgaaaagcgaacctaacacaccgccaagggcgatataaaaataaaaaacggtaaattgctcgttttcaggggctttgtttctcagctcaccatgacagaccataccggcggttaatagaataaagctgtaaattataagctgggctagggcattgaataagctgccaaaataaaacatcagcaggcctgcaaaagccgaaaatataaacgcatatgcccacacatgacgctgataatttactttgttggcaaacgtgtaactaaaggtgagcaagtaaattacaagaggtaacgaccaaagtaatggcatgggtggaatattagtgctgatcatatgcgtggtagataccaacatggccgagcttaaggcacttaataaaagccattgacctttaccttttaatagcgtgatatgcctagtctgaatagatgctcttgataaatcgggtgctttttttagtaaaaatattacaagaagtgctaataacaagcagtagctgatgagtccaaatagccagtaagtagtttgctgctctaaagaaaatagtaattcataaacgagtgggtagctcattaacgccattaaagaacccaagtttgagatggaataccaatggtaaggcacctgtgctgaagcagtttgcacataccatctttgtaaaagaacgctggtagcgctcagtagaataaatattggaccaatttctataaataaattaacaaacaccgcaagcgtaggcggccaatttgtgagatttggggctgcaaattctgtcacaacaatgagtgtggcaaagctgactaaaactatatgggtgactacctgcaacttaatatgaaagcgacccataccatgcgcatagaaatagccaataagtaacatgacttgataaaacactaaacttgctgaccagatagaagcaccaccaccaaattgcggtagaagttgctttgaaagcatcggctgaatttgaaaaattaaaaaagcactgatgaaaatagtgagcgttgataaatatttatacattgtttttattacctattttgagatagcaaaaacaatccaatagccagagcaaagtgacaatggagtaacgcttgagtttctcttaagaaaaccttaatctttgattcgtaaatatttattggagaagtaagtggcgcgttatcgaatcggcaaatttgcaattgatgagagtcgatgtttaatttcatcgcaagattatgagcaaatagtcgagccaaaggtcatggatgtattacataccctttatttaaataaaggtgaagttgtaagccaagaagtaatctttgcaaaagtgtggcctaatgctacctacaacccaagttctgtacagcgttgtatcgcattgctacgaaaagcactccaagaagatgccaaaaatccgcagtatataattacacaccctaagcgcggttatagccttgaaaaagtaacacaggggcaaagcaaaaaactaaaatcacaacatcttgggttgctgtttgttttactagtaagccttatcgctattgcgtggcaactagtccctaagcaacaagataatgctcactttacccaactgatgccactcacttcgagtgaactaaatgaagctaatttgtcactttcacatagtggtaagtaccttgcttttgttcgaggtaataaaggaagtcagcagatttggattaaagagcttgcgactgagcgagaggtgaggctaactgaagacgcagcaagctactacgctttggggtggtctaactccgataatgcgattgcgtttgtgaaaagcgcagagcagaaacaatatctgaacacattaagcattgatttatcgaaatttcagccattagaacaagcgacggtgagtgttttaaatgacaccgttgtgaccagtcaccatatcgattggcatgctgataagctgctctattacatagaaaaagataaactaaacaacgatactcgactggtttcacttaacttagaatctaaacaaaaggcacatttactagccgctacacagcaagattggttactcgttaatgcgttatcgaaagacggccgtaaagtcgcaatggggattgaagcgggtcaaaacaaataccgtattgatgtactcgaccttgccagtaaaaaaatacaaactattgctatcatagaaaacggtattcaagggttaagttggcacccgaacaatcaagcgctattgattagtcaacgaaatcagcttattaatctagagctagatggtgagcttcagctaatttcatttaataattatcaaataattcgtgatgcccagtacacaccagacgctgaagccattttgatggagttagtgaatgttgatgtagatattgttagccaaacacgcgccacccctgacaaattgaccaaactcgttgatacctcatcaatcgactttctacccgtgttttcgccagactcaacgaaatttgtttttgagtcacatcgttttggattaaaacaattatttttatacgataatggcaagcaaacgcgcatttttgctaatcctgataaccatgagttatttggcattgtttggagccaggacgcacgacaggtgtacaccgcaagtaaagatacattgtttaaaattgatttaagcagtagcacttatgaaacaattcctcacggcaatcattctttctatttgagagaaatgtatcacaatcaagacgcgattttagtttcgtatcgagcagaggatggacagacgtttcatccggctaaattcgatttaacaagcctaaagttgacaccattcacaggctcagggaaacgtttaagctgctatggtatggatttagatgagcaagaccagatctatttttcaaatagcaacgaagtgtttcgagttaatagccgaggagatattgagactgtttggcaagcagctaacaatgacatcattggtatatctgtaagcaaccagcaattagcggtcactatggagcatgctgatactattaatttccagcgtatcgatttggcaactgccgcaaccgaaagttggcaattaactcaacctaagcaacatatgctgatcaacagtgcccatgatttaacagagtttttataccttacagagcctaatagaactcgtaagttagtaaagcttctttagcttgatatggtctttatgtcttaattatttccacaagctgtttaattttttcatgacttagcgggttgtgggcatgattaccgtaaagcaggacgatatcaatgacaggcagtatcggaagtgaggtatcgctgatttcttccacacctgattgcatgctgattcgcgccatactgccaattgccagtccctgtttaatcaagccatgtaacgctcccgctgagccacaacaggcaataatattaaaacggcgttcggcctttaaaaggccttcaatactggcttggtgaaacttacagtctcgttgaaacaaggcgataggaagtggggttgaatcgttaatctcaaaagcggggcatttcacccacacgccttggcttgattgtaataagtaaccttcttcgctgtctggcgagcgagtggcaatcactaaatcgagcataccttggtctagcttggctctaagctcagtacttggggcgcagcttatttgtaaatctagcgcattaaactgttgatgtaaggcaccaacaagctctggtagtaaagagtgggcatagtcgtcaggacaacctatgcgtacgcgcatattgcctgtgcctgcttttaattgcttaaacgcttcatcatgaagcgctatcaattgttttgcatagcttgctagctggtggccttgatgagttagcaccagttgacgaccttgcttttcaaatagggggcttgcaatgtcttgttcaagctttttcatttgcatacttaccgcagattgggttctgcaaatttgtgctgcagcgcgggtaaaactgcctgtatcaacaaaggcacaaaaagtcctgagggcatcaatatccataatgtatcaactttacttataggtagcataaaaacaattggcgagtaattacccaattgctgttttatagtgaacctaatctaaacgttaaaggaagcgcaatgcaattatttattggcaataaaaattactcaacttggtcattaagagcgtggtatttactgagtaaattcaatatctcttttacagagcaacagttagttttagatacgcctgagttttatgaagcattaaaaagtaagtttccagtgcaaaaagtgccggcccttattgatgctgagttaatcgtgtgggattcactcgctatttgtgaatatatcaatgatgcttatctaaatggtgcagcttggcctagtgaaatagcccaaagagcaaaagcgcgcagtctagctgccgagatgcattctggttttgctgcacttcgcaatgaaatgccgatgaacattcgcgctaaaaggcatgttgaattatcagagcaagctaaaaaagatatcgcacgtatcgatgagattttttcggctcagcagcagcgttatcctaatgcgtggttatttggcgagttttctattgttgatgcgatgtttgcacctgtggtgttgcgttttaaaacctatcaggtggagctgtcgagtgcagcacaagcttattgccagcatgtgctagcttgccctgtgttgcaaacctggatcaatcaagcattaaaagaaaccgatattgttgtatgtgatgaggcaggaaaagaaatttcataacataattacggagtatttcattaatacttcgattgcccctacttatattgtgctggttaaaatgtgttatttttatacaaaataactagttcaattctaatctcttccttctataatagagttgttgctctttaattcaacacttctcattctcccttttgttgtaggcacatttatgggcgtttatgctgcaaagttattaaacaaagatatgactattaaccgttatgcttgtcagttcaagtcgaaacaggttgagttgttgtttatacaaagtaaattggtgcaagataaaaagcttgctcaatttcttgcatgtataatcgccgttgtgactatgctcgtcacttttttcgataagatgattattcagccagatttctggcctgatattgctttgattggcagaactatcactgtatttgtatgcgttagcgctgcttttggtattagttttgtaaagtcaccgaagcagttaataaagatggtcatcgcctttatgatatttatgtttttgaatatgcaatttatggttatcacctatgagcgtcattatatattgcatatgttttttgatgtcattgtattgattacattttacttctcgactttgctctctttgaaactatcagcgctattaggtgtgttttatagctgtttggctatttccgttatttattttaataaagatataaatttgcattctttttatgtggttattttagctcacatagcggctaatttagcgggatcgatcatggctgcccatgaacacattattcgtcgtgagctatttgtacgtaatacgcaattaggtcaattagctcaagaaatgaaaaagcaggccttgaaagatgcgcttacacagttacctaaccgcagagcgtttgataatacttatgagcattaccaaaaactcagtaaagaaaatcaatataaatcaaaacaagtatgcgttgttttagctgatattgattactttaaacgtgttaatgacacccatgggcacgaagttggcgacgctgtgctagaaaagttttcaacattccttacaaagtctttgagagcttctgacgatgtttatcgttttggaggagaggagtttgtaattgtgttgccgctttgttctgttgaagatgcgacgataattgtcaataaaatgattgaaacactgaatgctgagccgttacatctaaatgatatgtctttatcaataagagcaagctttggtttgacagttatgcgtgaggagcttcaaaagtctgttattgctcgagcagattcagcgttatacgaagccaaagaggctggtcgcaatcaactggtcgttaaaatctagcgagtctgtctaaataagttgttttagatttcacttttatttttattttatacctagataggtatattcagcatgcaaggagccgcaatatgctaccaggccaacctaagggctttaaagtttcaattcgcgtcagtgtgttactggtgtttgccttggcaagtttattaacagggattgtggcaattagtctccattattactttagtgaaaagtttgtactgcagacaaaaacggaccaatttaagcagaccagtcaacaaatagcagaccatatctcgagaataaatcatcgggttgataatacgctcagcgtaatgatccatgatactcgactcttttctgaagatagcaaggataaagacaccttgcgtaatgtgttgatagaggtactaagtcgacatgcggatttttactcattaattcttgcgcatcaaaatggtgatatgctgcaagtaattaatttaaaaggtgatgcaaccttacccgctagttttcaagtccggcctttggagcgctggttgatttataaagtctccgggcaaggtgatgctcgcaaaaccgtaaagttattcttggatgaaagcctttcggttattagagtcaacgaagaaaaaactgactatgatcctcgtacccgaaagtggtttaaggaggcctctagtgagtcagtctcaaagtctgagcagtatgtttttaatctattagaaatgccgggctatacctattcaatacagtcagcagacacaggtgatgtacttgcacttgatatagccagctccagtttgagccactttcttgtagagcaacaacttaaaatgcagtacttagtttcttctgaaatgtatgtttaccggggtgatggcgaaatcatcgcagcaagtcgtaatcaaagtcagcaacgaacattcgacgacttatctgcgcttattcgacttgatgagcaacaacctgggcttgccaataaaaagcaacagttcggtaaaatgcttgatgtgcacgaaaatggtcaagaaaaatatatgtttgtagtgccattgccacttagtggcggtatgcactctgatgaagtggattactttacagtgctagttgcgaaagaagatgtgctagcaattattaaagagaaaatcagaatctcaattttagtcacagggttatgtttattgttacttttgcccgtatcgtggttttttgcatcttcgattgttaatcctattttgaaattggtgggcgaaaataaaaaaatccaacagcgtgattacaatgaggtttctacactttcgagccatattttagagattcattatttagccagttctatggttgatatgagtcgctcaattgagcagcatgaaaactcgcaaaaagcgttaatggaatcttttattgagcttatagcgcaagcaattgatgataaatcaccttacacggcagggcattgtgagcgggtcccagagctcggtatttggcttgctgatgcagcatcagattcaaaggatgaggcgttttctgagtttagttttaaaaccccagatgaacgacgagagtttcgtttagcagcatggttgcatgactgcggtaaaattactacgccagaacatattgttgataaaggcactaagctggaaacaatttacaaccgaattcatgaagttcgtatgcgctttgaagtactgctgcgagatgcaaaactagactactacgaaaaactgcttgtaaacccagaaaaaaaacagcagttacaacagcaattagacgctgagattgaaaagttgcatgcagattttagctttattgcggcatgtaatgtcggcggagagtttatggatgagtcgcaattaaatcgtttacatcagattgccagcatcaagtggtatcgtcacttcgatgctagtcttggtttatcgccacttgaagagttgcgcatggtaaaccttaaagatcaaactttgcctgttgaagaatcactattgagtgataaaccaagtgatttaattcctcatgaaaaggccgttgattacgaagctgatttagggataaaaatgacaatccctgagtataaatacaatctaggtgagatttataatttatctatttcacgcggtacgcttactgctgaggataggtttaaaattaatgagcatgttatcagtactattcgcatgctttctaatgttccttttccgaaagagcttgctcggatcccacgctatgcctcgacgcatcatgaaagattaaaaggtactggatatcctcgccaattaactgcaaaagatttatcaatacctgaacgagtgttagtgctggctgatatttttgaggctctaactgcgacagataggccgtataaaaaagccaaacctctgagtgttgccgttgatattttagcgaagatggtcgatgacgagcatattgatcgtgatgtatttgagctatttttaacctcaggcatttacctaaaatatgcaaaacagtttttagatgagtcgcaaatcgattcggtcgatattcaaaaatatctaagataattatttgcttatgctttaggctaatattgcagtgtttttgtttgtaatacaaagttattggtgtatacatattatacaagctaatattatttacgaacaaagcattgcaaggagatgcataagtgctggtatctgcttttcaaaaactcaaacaaaaaattcgtttttcgattcgtcttaccgttgttgctgtgttcgtattagcaacctcactcaccgcgttaattgccatcagtttgcaatattatttcagtgaaaaaatggcgttagaagccagtgtcaaaaactttaatttagccacaggctctgtcgctgattacctgaccggtgtgaacgaaaaatctgaaaacactttaagtgtgatggtacaaaacggtagtcttatcagtgccaacaatgaagataaaagtgaactgagaaatgttatgagtgaaatcatgcagctcaatccattgttttatgctttatatgtggggtatgaaaatggtgacttttacgaattaattaatttagagagtagtgaaatagttcgccaacagctgcaagccatcgaagctgatcgctgggtggtgatccatattaccggtgaaggggcagatcgagttcagcacactcattactttgaccagcaatttaatttacgcatctctcaaacaaaaggtaccagctatgacccccgagagcgtttgtggtttaagcaagcaaactctacccgtgtcaataaaaccaaaccatacttctttacccacctgcaagcaccagggcaaacctattcgataaagtcagcaagcgaaaatagtgtgttggcgttagacgttagcttatcgagcatttcagagtacctaagcaaacagcaaagtaaaatgagcagtcaatatttaagtgagctgtatatttataataaagagggtgagattgtcgcctctaaccaacaaaagcatagcttacttctgccaacgctcgaaaaactccctctgactgaggcccagcaaagtgtcttggctaagtacccttatttaagtgtttcaaacgaaactaattggccgccaatggattttagtgttggcggtaaccccaaaggctatagcattgattacattaatggcttggccaatatgctcggaattaaagtgacctttatcaatgggtttacttggtctgagtttttgaatcaatttgctaaaaaagaaatagatgttattcagcctatttttaaaacgcctgccaatgagccgcttggtattatgagccaaaccatggcaaccttaccatttagtattattactgcacaaggtacgcccccagttgttagcatgaagcagttggcgggtaagcagcttgcaattggcgaaggttggtcggtgatcaaagtgatcaaagagcactttcccgacatcgacattgttgagctgccaagtacaaaagcggtacttgatgcggtaagccaagggcgggtctttgcaggcctagataacgaggcggtgttcaaatacacccaaaagcagttttttattgatggggttcaatataatcagcttgatagttacagccatgaccttttacccgatacgctgcatttactgtttcacccggaggatgcagcgcttaaagatttaattgatatggcaatagagcaactgccagattcgtatattgcagcacttgagcgtaaatggttaggaagcgaccccaatcagcaaccacaagtgattggcaccgtgccttaccctgaatttttaaccttaattaaagataaaacaaactttgcccatttacgtttgatgactcttaatggggttgaaaagtacgtatatatcaccccgctttctgagatgggcgataatagcgatttcctagccatagtggtgcccaaagaaggtgtattaagctctactcgcgagaaaattaagctgtcaattttaatcactgcggcatgcttaattatggttttacccgtgtcgtggttttttgcctcacctatcgttgcaccaattaagaccttagagggcgaaaacttaaagattaaacggcgtcaatttgaccaagtttctacgctaaaaagcagtattaaagaaattaacaacctatctcgctctatggtgcaaatgagtcaatcgattcagcaacatgagcaaaagcaaaaggccttaatggagtcatttattgagcttatcgcacaggctatcgatgataagtctccctatacagcagggcattgcgaacgggtaccagaacttggcattatgttagccaaagcagcttcaaactcaaatgaacatgcttttaaagagtttgcgtttaaaaataaagacgagctaagagaatttagtctcgcagcgtggctacatgactgcggtaaaattaccacgccagaacatatcgtagataaaggcactaagttagaaacaatatacaaccgtatacacgaagtgcgtacacgttttgaagtactttggcgagatgcagaaatcgcttatctaaaagcattgcaagccacacccgaaaagcagccagagcttgaggctgaacttactaaacgccaagcagagctgcggagtgatttttcgtttatcgctacctgtaatgtagggggcgagtttatggatgaagctagccttgagcgtttagaagcgctcagcactattacttggcagcgctattttgacgataaaataggcctttcaccagtcgaagagctgcgagttcatagcaatgatgagcaactccctgtaactgaaaagctactttcagataagcctgagcatttgattgcccacgataaaccaattcactatgatgaacggttagggataaaagtagatattccagagtataaatataacttaggagagttatataacttacaggttcagcgcggtactttaacaagtgaagaccgatttaaaattaatgagcacattattagcactatacgtatgctcgataatgtgccgtttcctgaagaattagcccgtgtgccacgttatgcctcgactcaccacgaaactttaaaaggcacggggtatccgcgtaagttgtctgcgggtgatttatcgatacctgaacgcgtgttggtgcttgctgatatatttgaagcattgaccgcagccgacagaccctacaaaaaagccaaaccgctgagtgttgccattgatattttagccaagatggtggccgatcagcatgttgatgaagatgtattcaaattgttcttaacgtcaggtatttaccttgagtatgcaaagcgctatttaaacccagagcaaattgatgatgttgatatcgcaaaatacctgtaactgagggcggttgcttttactttaggctgaaaagtccgtacaattcgcctcgtttttagtgacgcttttaacgagacgaattcaagccgtatgcatcagattgctgacttaatcactatttttgaaaacaccttttatcaaagtcataatacacgtttgataaaaggtgatgatgaacctatttacctgcctgctgatgagcaaacgccttatcatcaaattgtatttgcccacggtttttatgccagcgccttgcatgagattgcccattggctggtggcaggagaggcgcgccggttaaaagaagattatggttattggtattgcccagatggccgtgataaacaccagcaagctgaatttgaagcggttgaagtaaaaccgcaagccattgagtgggcgctcagtacagcagcgggtttcgattttaatgtatcggttgataatcttaatggcgagcaaacctgccggtttgattttcaggcgcgggttcatcagcaagtattggatttattagcatctggctttaatcagcgcacagaggcgttacttaaagcattgagcgatttttataacaccccatggccattatccgctgcacagtttacgtggcagcgcgattttcatagcaacccaggagttttagctgatgcagtttaaattaggtttgattgtaaatccagttgccggcttaggtggcagtgtggcactcaagggcagtgatggggcagataccgcagcaaaggcaatgcaacttggcgcagagccaaaagcaaacttacgcacccgagcggcacttgaggttctgcttgcacatcaagatgagttaaccatttacactgtaaacggtgaaatgggtgagcaaacggcaagccagcttggttttaatactcacgtcatttaccaaacaaatgaaatcactacccctgatgatacagagcaggcagccaagctattggtcgagcaaggtgtcgatcttattttatttgctggtggtgacggcactgctcgcaacatttgtcacgcagttggtgatagcacacctgtgttgggtattcctgctggctgtaaaatacactctggtgtttatgcgattactccaaaggcagcaggtcgcgttgtcgaaatgttagtaaaaggtgagcttgtaagccttggtgatgccgatgtgatggatatcgacgaagaggcatttcgcgaaggcacggtaaaagctaagcgctatggtgaaatgcaagtacctagtgaagtgcgttatgtgcaagcagttaaaaatggcggcaaagaaacggatgaattagtccttgctgatattgcggcttatgttgttagtgaaatggatgaagactgtttatatgtgatgggcagtggttcaaccgtggctgcaataatggaagaaatgggccttgaaaataccttgttaggtgttgatttagtggctgatcaagaactcgttgcacaggatttaacggctcagcaattacttgagcttaccgaaggtaaagcgactaaattagtgattaccttaattggtggccaaggccatatattcggcagaggaaatcagcaattaagccctgcacttattcgtgctattggtcgtgacaatattattgtagtggcgactaaaactaaattacaggccttaaatggccgaccgctgattgccgataccggcgatagtgagttagacgatgaattaagtggttatatacgcgtaaccaccggttttaatgaccatattatgtatgcagtgggtcatcaagatgggctgcacccagaggagaagtaacaatgagtttagtaagttatattgatgcagcgcagcaatattttgatgatttagttgataaagcgactgacgacgaactgtttgcgggtggctatttacgtggtcactttgacttagcggtaggttatgcacaagtagaagaattaaacttgtcaattgaggaacttaacaatcaagtagaatcaagcttagttaaagcttaccgcaatggtgagctaaacgaagaagataaagagcttgttgtgcgtctgtgggatgaagttaaagcgctagcagcttagcttagtatctaaactaaatttataaagcgacctttgtcgctttttttacagctagaccttagcattatcagtaaagctattaacttaaaatttaccttattacttagatacgttaaggttaacgagaattttttctagggaatttgaaaatgaataacaataatgatgtgcaagcacaaagcggtgcgatagcacgttttctaaatacgattgaaagggtgggtaataaactgcccgatccggcgattatcttcttagtcgctatgctattaatttggtttttatcttggctcttttcgggcaccacatttgacgctatagacccacgcacaggcgaagccatagttgtaaataacttacttgcgggtgattcattagccaccttcttatcgtcgatggtgaaaacatttaccagcttcgccccgcttggtgtggtactcgttgctatgttaggtgtcggggttgctgagcattctggcttcatcaacactggcctcaaattaatgttaaaagtaacgccaaaacagcttttaacgccttctattattttagtggcgattgtcagtcataccgccactgatgccggttatgtattagttatcccattggctggggttattttctatgcgatgggtcgtcacccgcttgccggtattgctgcagcgtttgctggggtaagtggtggctttagcgcaaactttattccatcaggcattgacccgttactacaaagctttacccaaagtgcggcgcaaattattaatcctgatatggcaataaacccgcttaataactggttttttacctcggcttcgagcctatttattatcttattaggctggtatatcacagataaaatcatcgagccgcgcttacaaaacacgccacttgatggtgacacacaagatttacctgcctttgatgaagcgcgcagtgatgaaaaacgagcgttttatattgcaagcacagtgatgattgcaggccttgctttactttggtttgtctcagccccagccgattcagcaatgcgaagcagcgatggctcattaactaacttccgctcaccgttaatgcaatcaattgtaccgcttattttcttactgttttggatcccaggcgccgtctacggttttgcagtgggtaccttcaaaagttctaaagatatgatagatgccatgagtaaagctatgagcggtatggcttactatattgttatggcgttcttctgtgcgttatttattgccgcatttagtaaatcaaaccttggcgcattacttgcgattgagggtgcagagctacttaaagcaatggcactgccaagctcagtcactgtggtaggtattatcttcttaacggcattcgtgaacctatttgttggctcaagctcagcaaaatgggcgctgttaggaccaatctttgttccaatgctgatgcaactgggtatttcacctgatttaacgcaagctgcgtaccgtgtaggtgactcaagctcgaatatcatcacgccactgatgccatacttcccactggttgtagtgtactgtcagaagtatgttaaaggcacaggtatcggcacattaattgcgatgatgttaccgtattcaatcgcctttttaataggttggagtatcttcttacttgcgtactggggcttaggtatcccactaggtctacaatcaagctacgcatacccagccattggttcataatgattaagttttaaagcctcagcaatccagcttgaggctttaaaaactgcggtctggtagctaacagctttactacagacacaaaaaaaccttgtcactcgcatgacaaggtttttttattgcttacagcttacattagttagctgtgaagctcactggacgacgctctttacgagggccaccacgtttttcaccacggtctttgaagttacgctttttatcaccacggtcaccacttgggcgttctgcgcgaggagcagcaggaccttgatcttgtgttagcgtcatattcataggacgtttacagataaataccttttggaagtgatcaagcacatcttttggcatattctgtggtaattgtactgtactgtggctatcgtgtaagcgaatatcaccaataaacttgcttgagatatcagcttcgttagcaatcgcaccaacaatgtttttaacttgtacaccgtgctcgcgacctacttcgatacggtaagtatccataggacccatgctgcggctattgcgctcgcgcggttcacgaggtttacgctcgcgtgcagaacgctcaccaccacgatcaccacgttcgttgcgacgacggtcgccacgttcgctgcgttcgccacgcggttgaactttaacttcttcaaccttgattggtgattgttgctgcgctaaacaaagtaacgcacctgctaagtcttcagtacttaactcaagtttttcagccatgttagcagctacttgattaaagaacgtaatgtctttgttttcaagcgcaattgtcaacttgtcttgaagtgctttaatacgcttttcttcaacgacttttgcagttggcaagtcaacttgtgcgatctctgatttcgtatgacgaatgatatttttaagtaaataacgctcgttgtgttttacgaaaagaatcgctttacctgtacgacctgcacgacctgtacggccgatacggtgaacgtaggcttctgagtcttgcgggatatcgtagttgataactaagcttaaacggtctacatcaagaccacgtgcagcaacgtctgttgcaataacgatatcaactaggccgtttttcaaacggtctactgtacgttcacgtgcttgttggttcatgtcaccattaagtggtgccgcagagaaaccttcgcgctcaagtaattcagctaactgtaccgtgtcgttacgcgtacgtacgaaaacaattgcaccatcgtattcttcagcttctaagaagcgaacgattgctttgtttttgtgtacatgtgcattccaaaatacttgctcaactgttgatacagttgagttacgagcagaaatatgaacttgctcaggctcattcatgtacttgctgctaatattttggatttgcttaggcatggtcgcagagaaaagacatgtttgcttttcacgtggcgttttctccatgatgctttcaacatcatcaatgaagcccatgcgtaacatttcgtctgcctcatcaagaacaagggcttgtaagctctcaaacttgatagtgccacggttaatgtggtcaattaagcggcccggcgttgcaacaatgatttgcgcgccacgacgaagtgcacttagttggatgctgtagctttggccaccataaagggctaaaacttccacaccacgagtatgcttagcatattgttcgaatgcctcagctacttggatcgcaagttcacgcgtaggcgttaaaacaaggatctgtggctgcttcacagacgggtcaatattatttagtaacggcagtgcaaatgctgctgttttacctgtacccgtttgcgctagtcccagtacgtcctttctttctagcaataacggtatacattgagcttggatttcagatggagtcttgtaacccaactcttcaactgctttaaggattgcaggagaaagatttagagattcaaacgtgactggttctgacattaatacgcctcaacgaatttaaagaggcgcgcattgtataggaaatacaaggcaattgcttgtataaattacaactaatttgtatgtggttgatgttggtcataatttaatcaatttaaatttgcaaaaatcaaccacgtttacaatttattgatataaccctaaattttctttagcgtatgcttcgaactcagtgaagccaccaatgtgggcttggtcaataaaaatctgtggtacggttgggcaaggtttgccagcagactgctctaaatctgctttgctgatgccttctttaatgatgtcgatatagcggtatttaaaatcatcacgctcattagctagtttttcagcaacgtcttttgcacgtacacagtatgggcagccttcacggccaaaaattacagttaacatatcgctctcctcgatggtttatctggttatcatcttaacgaattaaataaataaaaacagtgcataaaatcgattgtactgttctattttttctcagcaaatgtgattgagctaatcaagtgtgcggattctgaggccgagttctgttgagtaacccatagaatgcgcagtgatagccagctgctcatcaataacataataagttgggtaggcactgattttataatcttggcctgtacttttactgccaagtaacacaggcatggttaattcgagtgaatcagtaaactgttttacttcagtaatattctcataatcgagggcaatcgctatcgcatttaacttaccttgctgataggcagtttctaaatttggcatactgtagcggcaaattgagcaccatggcgcaaagaaatacaccactgtttgctttccttgcaattgcgcaatagtcattcgctgtgtcgggtcttttaacgtggccaaattaaaatagggggcaggggttttatcagttgagagtaaatttcgctgctgaaatgtggtcacggcatacacaatgactgccattaacacgacattttttagcacacttaaaaatttttttaaaaaagttggattttttttcattgttattttgtacgtggttagccctttaaaatcaacttattcagaccagtttgagagcacttaactttcatttaatttaaaaaaattgcaatttttttttgctaaaaatcttgaaaagaatttacccgcccataaatagtttagtgaggacgcctgatgggtcccaaacaaactaaagtaattgaaatatataatattaatttaactttgttagcgctggttcaatagaagagcactaacaaaatatcgcttaaatatgaggatataattatgcgtacagtagacttatcaccactttatcgttcattcatcggcttcgatcatttagcatcattaatggatgcggcagctcgtacagacaagcagccaagctttcctccgtataacatcgaagcgctcgataaagacaaatatcgtatcactatggctgttgccggttttagtgaaagtgaattgaccatcgagtcagaaaacaacacattaaaagtcagtggcacaaaagctgacaaagaagacaatgcagagcgtaagttcattcatcaaggcattgcagagcgtaactttgaacgtaagttccaattaggcgaccacgttaaagtactaggcgctgaccttgaaaacggcttactaagtatcgatttacaacgtgaaattccagaagcgctgaaaccacgtaaaatcgaaattggtaatggtaaattactcgagaataagtaattttatacttatcaacaaagcattgtttccctagttatttgttagtaataagccgcctcaattgaggcggcttttttattacagcttttctaaattatttaaacaccagttggctcgctcaagcgtcgcttgctgaagagcttcatcttgtttataccagtttttatagatcataccgatccgtgggttttgcgataactgttcctcatgctctaacataaagtgccaatataaactgttaaatgggcacgcatcgtcagtggttttctcttttactttgtagctgcagtgcttgcagtaatcactcattttattaatgtagttgccactagcagcatagggtttagtggcaattaacccaccatcagcaaactgactcattccccgagtattgggcatttcaacccattcaatagcatcgatgtaaatacctagataccatgcatcaacttcagttggctcgattgcggtcaataagcaaaaattcccagtgaccattaagcgttgtatgtgatgggcataagctgtttcaaggctttgtttgatggcatgctgcatacaattcatgtttgttttaccatgccaaaaatactctggcagggaacgctgtgcatttaagtgatttttttcactgtattgaggcatattctgccagtaaatccctcttacatactcgcgccagccgaggatttgtctaatgaatccttcaacttgcgcaatatctatatcatcagtatgttgctcgtaggtgtctaacacttgtttaatgacttgcatcggatgcagcatcttggtgttaagagcaaatgacaagcggctgtgatacaaagaccattgatgctgtgaattgcaggtcattgcgtcttgaaattggccaaaatggggcagcaggttttcacaaaaaaaacgcagcagttgtttggcatcattacgtgtagttggccacagcaaagtttctccgcattcgccgaaggtatttactttatgtttttcgatacgttttaagatgtggctcacgtcatggctaaaacataatggagctgggattttatcaaggtcgttttgttttaacttatttctgttttgctggtcaaaattccattgcccgccgcaaggttgattatcgtcgtctatgagaacattaaagcgctttcgcattgcacgatagaaaaattccattttgacgtgtttatcttttttaaagtgcgtacttatatcttcaaacggcagtagaaagtgctctgtatcatagcctttgacgtctaaatcacttttctcagcaaattctgacatttgtttttttagtctgaattcatcagggtattgatattcaatagtgctgcactgatagtgtttggccagtcgggtcaataattcacacaaggtgctgtcatcttttgtatcatcaagcgtaaggtgtaggcaatttaacccgactttatcaagcgccttagcaaagttttccatggctgcgaagaatgctgctaccttttggatatggtgcttcacatagtttgtttcttgttttaattcggcaacaacatatagtatatgttgttgatcttgctctttgtaccagctgtggttggcgtttagctggtcgccaaaaataaatcggatggtagaaaattgcacgctgtctatacccagtctgaggtaaattattctttacgacgtaaacctgaatatcgatctattatagagtatgaatagctattagggtgttaccatttaattgatatacaccactacggaaggtgaaatatgaacaataatgtcattcaattagtaattgccatcacaggggtgttggcaagttcaattgcaaatgcggccatttacaagtgcgagcatgatggtactgttgaatttagtcagcaaccatgtggtgttgatgcaaagctgatagttatcgaagaccatcggcttcaaactaaccctaactcagtacctaaacctgtcgcacttgctaagcaaaatgatgagcttgatagatatattcgtttgaaacaaatcgctgtgaaaaaggctgagcatttcgataagatagatacctataccgcgcgattaaatagtgaaatagctgcattgaataatcaggcagatgagtactttcgctcttcatttggagcaaaaaaggcggccgcagtagctgaacaaatgactgctgtttcagagcgttataatttattaatcgataatgaacaacgtaatattgatagattaaatgcagagcaagctagcttagagtcaacgctatcaaagactgaaaacaccgagattgatagctatattcgcagtgaacagatcaagcgaaaaatgactgaacacaagaacaagatagacagctattacgatgaattgaatcaacagatagccaaattacaacagcaagctgataaacaggcaattaatcttagtactgttaataaagattatgcgttgtccgccaaaatgagtgcagtaactaaaaagtacaatactctaattgcggtagaacaacgccaattagacagattgagtaatgagctggttaaattatgaggttcgtcttactgcgaaattatcttgcagtggtatgacattgctgtatgaaaacaaatagcacttaacgatatttgcaaaaaggcgagttgctaattgccacgcatctttaagttgttcactcataggttcttgcattgattcaacggttttcataaaagcattcgttaaattatctatatcttgacttgttacctttaaaaaactgaggttgttggctaagtattctatgaaaggtgttacttgtttcaaatcatctaagtgcatgacaactttattcaaagcacaaaaaagcagataactacgcctattaatactttcttgactgggcagggtcatgtgtaaactatgcttattggccagtgtgtggaactgtaaagtaaattgatggaaattaggttttaaatgtttaatgttttgctgtaaaagccttttttgtgcagtggataaactcatcgcagctcacttatatagtcttggctataggttgttcttattatatgacttaatatagaccagatttaataaaacaataaattttatgacaatgctgtcataaaatttttaggtaaaaaatagtctaactaattcatgctggaaggttgctaattgagcgctacatgcttataatggccgccattgaattgaggtgttaatactcgattagatgatattaagtaatttactttaatatcgattggcgcgggatggagcagcctggtagctcgtcgggctcataacccgaaggtcgtcggttcaaatccggctcccgcaaccaactacatactaaggcattttaaatgcgcttagtgtgctcagtaattaatttactgtatgaagtcgcgcattctgggtaatgcgcgttttgcgtttaggctatctagtttaatttagtcagatatttgactcgcaaccaagcttggccctaggccacacagttttatgctttaggtgtgacgccccgcttggttcggggcgttgttgtatctggtctagcatgatgtgttttaatcatcattaaactcagtatttcagggctttatgccctttttttgtttgtatggaggattttcgtgacaaaacttgagcaagatttagtaaccatgctctcaccagccgtagaaatgttaggctttgagttacatggtcttgagtttgtgcaagctggtcgccactctacattacgtgtttatatcgatcacgatgcagggattacggttgacaattgtgccgacgtaagtcgtcaagttagcgcaattttggatgtcgaagatccaattacaaatgaatatgatttggaagtgtcgtctcctggtgttgatcgtccattattcaaacaagatcattacgagaaggcgcaaggagaagaagtacgcgtgcgtactaagcttccacaagatggtcgtcgtaactttaaaggcgacttagtatcagttagcagtgatatgatcacactttcggcagatggcactgagcatatgattatgcttagtaatatcgaacgtgcgaacatcatcgcaaagttttaattcgagtgcgaaggaatagggcaagcgaggcataacccatggcaaaagaaatattattggttgctgaagccgtctccaatgagaaagcggttccaaaagaaaagatttttgaagcgttagagttcgcattagcgactgctacaaagaaaaaacacgatggcgaaattgatgttcgcgtagcaattgatcgtaaaacaggtaattacgatacattccgtcgttggaaaattgcagaagttcttgaagatggttcattagaacatccttacagcgaaatcacattagaagcagcacaagttgaagacccgtctttacaacttggtgattacgttgaagagcaaatcgaatcaattaaatttgaccgtattacaacgcaaatggcgaagcaagttatcgtacaaaaagtacgtgaagctgagcgcgcacttgttgttgaagaatataaagatcaacaaggtgaattagtaactggtgttgtaaaaaaagcaacacgtgacgctattatccttgacctaggtaacaatgctgaagcggttatttaccgtgacgacatgctaccgcgtgaaaacttccgtccgggtgaccgtattcgtggtttactttacgaagtaaaaccagaagcacgtggagcacaattgttcgtaacacgttctaagcctgagatgctaatggagttattccgcattgaggtgccagagattggcgaagaaatgattgaattacgtgccgcggcgcgtgatcctggttctcgtgcaaagatcgctgttaaatcaaacgacaaacgtattgaccctgtgggtgcgtgtgttggtatgcgtggtgcacgtgtacaagctgtttctacagagcttggcggtgagcgtgttgatatcgttctttacgatgacaacccagctcaattcgttattaatgcgatggcaccagcagaagttgcgtcaatcgtaatggacgaagacacgcattcaatggatatcgctgtagaagcagataacctagcgcaagcaatcggtcgtaacggtcagaacgtacgtcttgctagccaattaactggctgggaattaaacgtaatgacagttgatgaaatgcgtgaaaagaatgaagctgagtctgataaactaatcaacttattcactgagtacctagatattgatgatgagtttgcaacattacttatcaacgaaggtttctcaacacttgaagaagttgcttacgttccagcatcagaattcttagaaatcgacggtttagatgaagaaacagttgatatcttacgttcacgtgcaaaagacgcgttaacaacaaaagcgcttaagacagaagaaagccttgaaggtgcagagcctgcagaggacttacttgcacttgaaggtcttgagcgtcaccttgcatttgttatggcaagtaaaggtgtagtaacactagaagatttagcagagcaaggcattgatgagttagtggatatcactgaactttcagaagaagaagctggcaagctaattatggctgcgcgtaacatttgttggttcgcagaagagtaatttattaacggaggtattacacactatggcagaagtaaatgttgaaaaactagccggagatattggtacaactgttgataaactactacagcagcttgagcaagccggtatttctaaaaaagcaggtgatatggtaactgagtctgaaaagtcaacgttacttgaccacttgagcaagcagcatggcggtacgggttctgaaggcccagcccgcatgactttgcaacgtaaaagcaaaagcacgcttagcgtgactggctcaacaggtaaagcaaagtctgtccaagttgaagtacgtaaaactcgtacttatgttaagaaaagcgccattgagcaacagcaagaagaagagcgtttagctgcagaagaagctgcccgtaaggcagcagagcttaaagcccagcaagaagctgaggagcttaaagcgaaacaagaggcagaacgtaaagcgaaagaagaagctgaccgtaaagccaaagaagaggctaaacgcaaagctgaagctgagcgtaaagcgaaacagaagcagatgaccccagagcaaagtgctaagtctgaaaaagatcgcgccgaagctgagcgtctgcaaaaagaagcagaagaggccgcattgagaaaagctgaagaagaagcgaaacgtcaagcagaagaggcaagaaagctagctgaagaaaatgaagctcgctggaaaaaggaagaagaagagcgtaagcagcgtgaagaaaacgctgatcaccaccttacaacttcaacttacgcacgtgaagcagaagatgagtctgatgcacgtgaagagcaaagcgctcgtcgtaagaaaaagaaaaaaggacctcaaaaagagaaaatgcctgttggtcctaaaggcaaaaaaggcaagcttaaagcaccaacgtctttacaacatggtttccaaaaaccaacggctgacgtgaaaaacgaagttcgtatcagtgaaacaatcactgttgcagagcttgcatcacgtatggcggttaaaggtgctgaagttgttaaaacaatgatgaagatgggtgacatggttaccatcaaccaagtgatcgaccaagaaacagcacaactagttgctgaagaaatgggccacaaggttatcatcgttaaagaaaacgaattagaagagaaagtactaagcgaccgtagcgaagaaggtaaagccattcctcgtgcaccggttgtgacagtaatgggtcacgttgaccacggtaaaacgtcaacacttgattacattcgttcagcaaaagttgcttctggcgaagccggtggtattactcagcacattggtgcataccacgttgaaacaaatggtcacatgatcacattcttagatactccgggccacgccgcgtttacatcaatgcgtgctcgtggtgcgaaagcaacagatatcgttattctagttgttgctgcggatgatggtgtaatgccacaaactaaagaagcggttcagcacgcccgtgctgcaggcgttcctttaatcatcgcagttaacaagatggataaagaaggtatcgacccagatcgcgttaagaacgagttagctcagttagacgttatccctgaagagtggggcggtgatacgcaatttgtacacatctctgcaaaaactggtttaggtatcgatgacttacttgaagctgtattaatgcaagctgagatcttagaacttactgcaccagcagaaggcatggcggcaggtgttgtaattgagtcacgtcttgataaaggccgtggtccagttgcgtcaatcctagttcagtctggtacgcttaaccaaggtgatatcgtactttgtggtcttgaatatggccgtgtacgtgcgatgaaagatgagaacggtaaagacatcaagtctgcaggtccatctatcccagttgagattttaggtctatctggtatccctgctgcgggtgatgaagctactgttgttaaagatgagcgtaaagcgcgtgaagtagcactttatcgtcaaggtaaattccgtgaagtgaagcttgctcgtcaacaaaaagcgaagcttgaaaacatgtttactaacatgacggaaggcgatgtttcagaagttaacatcgtacttaaagctgacgtacaaggttcgattgaagcgattgctgattcactaactaagctttctactgatgaagttaaagtgaagattgttggttcaggtgtaggtggtatcactgaaactgatgcaacgcttgctgcggcatctaacgcaatcgttgttggctttaacgtacgtgctgatgcttcagctcgtaaagtgattgagtcagaaaacctagacttacgttactacagcgtaatctacagcctgattgaagaagttaaacaagcgatgtcaggtatgcttgctccagaatttaagcaagagatcattggtcttgctgaagttcgtgacgtgttcaagtcacctaagattggtgcaatcgcaggttgtatggttactgaaggtatcgttaagcgtagcgcgcctatccgtgtacttcgtgataacgtggttatctatgaaggtgaacttgagtcactacgtcgctttaaagatgacgtacaagaagtacgtaacggtatggaatgtggtatcggcgttaagaactacaacgatgttaaagttggcgaccaaatcgaggtattcgagacggttgaagtacaacgttcactttaatttcgtttaagtcactattttaaatgggggcctagcccccatttgtgtattcgtaattaaattaacttattgtttaacatcaataagttattattttagagtgaaatgaaatgagagaattttctcgcactgatcgtgttgctcagcaaattcaaaaagagattgctgttattcttcaacgcgaaatcaaagatccacgcttaggcatggtgacagtgtctgcggttgaggtatctcgcgacttatcttatgcaaaagtatttatcacagtgtttaatactgatgatgaagataaagccaagcaaagcgctaaaatcttaaatgaagcaacgggttatattcgttctttattaggtaaacgcattcgtgcgcgcatcatgcctgagttacgatttgtaatcgacaactcgctaatggaaggtatgcgtatttcaaacttggttgactcagttattcgtgaagataatgccaagcatgtaaacgaagatgatagcgaagaaggcactaaagactaatggctagacgcagtaaaggtcgtgctattgacggcattttattacttaataagccgcaaggtatttcatcaaacaaagcattgcagcaggcaaagggtatttactttgcacaaaaagcaggccatacaggtgcgcttgatccgcttgcgacgggtatgctgccaatttgttttggtgaagcgactaagtttacccagtttttgcttgatacagacaaaacttatgttgtacgcgcaaaacttggcgagcgaactaccacctctgattcagatggtgaaatcgttgagacgcgtgaagtatcagttacgcgtgagcaattagctgagcaaattgccagttttataggtgagtcggatcaatatccttcaatgtattcagcgcttaaataccaaggccagcctttgtataaatatgcgcgagagggcattgaagtgccgcgcaagtgtcgaaaaattaatgtatttagtttaacgcttgatgagtttgacgaagcgaacaacgaagtacaaatgacggcgcatgtgtctaaaggtacctatattcgtacaattgttgacgacttaggtgaaaagctaggttgtggtgcgcatgttatcatgttacatcgcagtgctgtgggccattatcctagtgagaaaatggtcactcttgagcaacttgaagaaaagctacaacaagcaaaagcagatgatttggcaccttcaagctacctagatgagctacttttgccaatggataccgcactggttgatttacctgtgattgaaattacacaagagcagggcgtggcgttcagccatggtcaaacagtggtaattggtaaacctgtgcctgatggcgtggtaaaagttatggctgatggcgtgtttattggcactggtgagcgtcataaagatgggcacctaaaatcaaagcgcggtttatcaaatcaattgcctgagtaaagattaccttgtagttattactaaagctggtagaatacgcccgctcaatcgttttggctgaattagtgatcggctaaaacacaatttaaattaatttttggagttactatgtcactaagcaatcaagaaaaagttgaaatcatcgctaaatttgcacgcgctgaaggcgacactggttcacctgaagtacaagttgcacttctaactttcgatatcaacaagcttcaaggtcactttgctgatcacaagcacgacttccactcacgtcgtggtcttttacgcaaagtaagccaacgccgtaaactgcttgattaccttaaaggtaaagacattgcacgttacactgcgttaatccaagagcttggcctacgtcgctaagaactagattacgagaaaaggggctatatagcccctttttttgtgcgcttatgaaaggtatactagcgcacatcttagtaggcaaatctgctaagtgattgaaaaaacatcattgccaattgtagtacttaattaatttttcttaagtttaattaagtactgtaattggtactttgatggactattttttaccaattcggagcactgctctgagttgcttttacatttaaaggacatttttaagtgcaagcaattattaaagaatttcaactaggtcaacacactgtgactctagaaacaggtgctatcgctcgtcaagctgacggcgcagtactagcaagcattggcgacacttcagtattagttactgttgttggtaagcgtgatgcacaaccaggtcaagacttcttcccactaacagttaactaccaagagcgtatgtacgctgcgggtcgtatccctggtggtttccttaagcgtgaaggtcgtccaaacgatggcgaaacacttatcgctcgtctaatcgaccgtccgattcgtccacttttcccagacggtttcgtaaacgaagtacaagtaatcgcgactgttgtttctgttaacccagaaatccaacctgacatggttgctatgattggtacttcagcagcacttgctatctctggtattccatttaatggtcctatcggtgcagcacgtgttggtttcatcaacggtgaatacgtacttaacccaacactagctgagcttgaagaaagccaattagacctagttgttgcaggtactgataacgcagtacttatggttgaatcagaagctgaaacactatctgaagacgtcatgttaggtgcggttgtttatggtcatgagcaatctcaagctatcatcaacgcaattaacgagttcaaagcagaagctggtaaaccagcttgggattggactgcaccagagaaaaacgtaactcttgctgagaaaatctctgcaatcgctgctgaaaaagtaggcgaagcttaccgcatcactgacaaagtagcgcgtaaagaagcacttggtgttgcaaaagaagaagttgttgctaaattaacagcggaacttgctgaaggcgaagagctagatacacaagaagttggcaaactattcggttcgttagaaaaagaaatcgttcgtggccgtatcatcgctggtgaaaagcgtatcgatggtcgtgaaccagacatggttcgtgcactagacgtaatgacgggtgttttaccacgtactcacggttctgcaatcttcactcgtggtgagacgcaagcacttgtgactgcaacacttggtactgagcgtgattcacagttaatcgacgacttaactggtactaacaagcatcactttatgcttcactataacttccctccgttctgcgtaggtgaaacaggttttgtaggttctcctaagcgtcgtgaaatcggtcacggtaacctagctaagcgtggtattgctgcggtattaccaacattagctgacttcccatattcaatccgtgttgtttcagaaatcactgaatcaaacggttcatcgtctatggcatcagtatgtggtacatcactagcacttatgaacgctggtgtaccaatcaaagcatctgttgctggtattgcgatgggtctagttaaagaaggcgacgatttcgttgttctttctgacatcttaggtgatgaagaccacttaggtgatatggactttaaagtagcgggtacttcaaacggtatcacagcactacaaatggatatcaagatcgaaggtatcactaaagaaatcatgcaaatcgcgcttaaacaagcgaaagctgcacgtttacacatcttaggtgttatggacgaagcgatttctgctccttctgaagagttatctcagttcgcaccacgcatctacacaatgcaaatccctgcgaagaaaatcgctgaagttatcggtaaaggtggcgcaactatccgtcaacttactgaagaaactggcacaacgattgaaatcgaagatgacggtacaatcaagatcgctgcaactgatggcatgagtgcaaacgaagctattaagcgcattgagcaattaactgctgaactagaagtaggtgcaatctacactggtaaagttgtacgtatcgttgattttggtgcgttcgttaatatccttccgggtaaagacggtctagtgcacatttcacaaatcagcactgagcgtgttaacaacgtaactgaccacctaagcgaaggccaagaagttaaagttaaagttcttgaagtagatcgccaaggtcgtgtacgtttaagcatcaaagaagcaatggaaccagctgctgaagaaaaagctgaagagccaaaagacgcttaatgatgattgagtagccagttatttgctggttataagaaaaaggggctgtttagcccctttttttatgctttaatgaaacctattagcttcgattttgtctacagaaaattcaggtattaaggaatttaatgatttttaaacacttagcattgaccgcagtggctattttttctttaagtgcgtgtcaaacaacctcacaacctgagtcagttccgattgttaatgttccatttactgcgccgctactgcctgatttccgcaatgaaattacgattgcgcgctactctgaacttttaaatcgtgcagatttgagtgcagaacaacaagccaaactttattatgaccgcggtgtattatttgacagcttaggcatgtcgacactggcacgtatcgactttaaccgtgcgattaagcttaaacctgatttagctgaggtgtataactttttaggtattcaccacacactcatgcaacagtatgaacaagcttatgagttttttgattcagcactagaattaaatgagcagcatgaatatgcttatttaaacagagggattgcgctctactatgctgatcgcccgttacttgctcaagatgatttgcaacagtttttaaatcgctcaccaagcgacccataccgtgtactttggctttacttagcacaatcagaagccgataaagcacaggccttaattgacttaaaagcaaatgcacaaggtgttgacgagtctcaatggggttaccagttacttgcactgtatctaggcgatgtcagtgagtttgaattcttgtctggtatcatcgaaggggttacctctgaacaagagtatgcacaccgcttatgtgaagcctatttttacctcgctaagatgcatcaagcggcaggtgataattacttggctgctgattactttagacttgcccttgccaccaatgtgcatgagtttgttgaatataaatacgctcgcttagaacttgagttaatggctggtgaagacgcgagctagtgtttatttgctggttattactttactgagcttgggctgtgtttcaagctcagtatcattgttttctccaagttacgttttttacgctcagaagagaccttcccaagccgttgctatttatcacctagcgcctaatgccctcaacacgcaattagacacactttcaaccctgcaattacgaaggctcgctgaacttaaaaatattaatgcaacctatcaacttgccatgcgatttttacaaaagggtgattactctgctgcgcaattatggtggcaaactcggtttgatagcttcagtcgtttacagcaacaacgcttagctgatcatctggcagcggatcaacaatggcaggctatttctatgctgtggcgtagcggccaattaccaaatggtaatgccaaacaatcttggtatttacgacaaagcatggcaacagcaaatataagtcctcaatatgcagaacaacatcaatttgtgttatcgctaaatgatttgaaagcacagccacagtgccattttaatgtgctgatgatgactgatcacgctgatggaattgctatgctgaagttgtttaagcaacgttacgagtcaaagccagaaccttcgctcaacagtttttgttttagcgaagttgtttatgtcgcagaccaatttcaatgtaacagcagtgataatgtgctgcagtgtgattggtatcaggcagaagattacacgtggcccgctggatttgattttattgttatgatgtctgaacagggcagtgctaacgtgcgtggcggaataatgcatattaattcaacacagccttatgctgtgtttttacatgagttgatgcattttaatggctttgaagatgaatacacattgccaactcaaaagcagcagtggctatgtcagcagcagggtcatgttgcaccaaatttatttatagcgcgtcagcttaaacctccagtaggctggcaaaagagtatcgcttgtaataataatttggcctataagccaagccctgattggtcaattatgcagtatcagttaatggggctgtctgaacagtatcgacaactttggcaaaagcaaattaaccagcccttaacaaagcctgttcgatttttagattactttgcttttttgggcttaaaaccttcaattacaatggcttcaactaaacatagtttttctgactaatcgtcaatttattgctattttagtatgtaaagcggttaaaacttgtgcgaataggtgtggctgctatagacaaaatagcccctgatcagtataactatacgcattgtaagcttttttgaagccaacttttaaccatccaaatgaacagtacgcaactaattataactagcagcagtattgatattcttatgacactaaaaggctcttaattatgactttgctctggatacccctgttatccttaatcggcagtgttatttcatcctgcacctcaaaactaacgcgtaatcaaagtaccgctttgactatgctagcgcctttgcttgcccttggaatagtattctcgtacacacctgcggtattttctggtgaaatgattcgctacagcgcagagtggatcccgttattaaacatgcaagtgtcttttagacttgatggtttaaccttactctttttatacatgatcttaggtattggtaccttagtgattttctatgcgcgttattatttaagtaataacgactccctgcctaagctctattgctacttaatgctatttatgaccgcgatggtcggaatagtaatgtcgaataatgttatccagctttggctattctgggagcttaccagtattagttcctttttgcttattagctattggtggcataaatctgaagcccgtaagggtgcgcgcatggcgcttgctattacaggggcgggcggtcttgcgctattggcaggcttattattgattggtgacatcgttggtagttatgatctggatgttatcttagcgagtaaagcactcattcaatctcatgcgctctacgaagtagcgttagtattggtgcttttgggggcgtttactaaatcggcgcaattcccgtttcatttttggttgccgcatgcaatggctgcacctacacctgtcagtgcctatctacattcagctaccatggttaaagctggtatctttttgcttgcccgtttctacccagcattagcaggcactgatacgtggtttatcttggttgctatgactggtcttgctactttattggttggcgcttatatcgcattattcaagcatgacttaaaaggtttacttgcttattcaaccatcagtcatttgggtcttatcacgttattacttggtttagatactgaacttgccacggttgcagcgattttccatattattaaccatgcaacgtttaaagcctcattgtttatggcaaccggtattattgatcatgaaacagggactcgtgacatgcgcaaactaaacggtatgtggcgctttatgccttatactgccacgcttgcaatggttgctgcggctgcgatggctggtgtgccattgttaaatggtttcttatccaaagaaatgttctttgctgaaaccttgcatcagcaagtactaggttcgatgtcgtggctcattccggttttagcaactgtagctggtgctttatcggtcgcttattctgcacgttttattcatgacgtgttctttaatggtgacccgattgatttacctaaacagccacacgaaccaccacgttacatgcgtgtgccaatcgaaattttagtggtgttatgtttattagtgggtatgttccctcactttgctgtgagcgatattttagcgtctgcttcgtatgcggtacttggtgatgcagctccagattataagctctcggtatggcatggctttaatttacctttattaatgagctttattgctacttgctgcggtgtgcttatctatgtgcaacgtaagcacctgttccatttccaagcttcattaccgacattaaatgctaaaaaaggctttgaacgaggcctgtattctgtgatcaaatggtcacaagctaaagttaaccgtattgaaaatggttcattgcaacgatacgcttttgtaatgattgtggttgttttgatgtgtgctggttggccattgtttgagatgcaacaactcgcgggcacaagtgaattaacacctattgattttcataacgccattggcgcgggtctgttaattatcggtgcgcttgtcactgttatttggcatcgttcgcgaatgatatctttgattatgatttcaattgtaggcctgatggtatctgtagctttcactcgattctctgcgccagacttagcactgactcagttaacagttgaagttgtcactgtgatgctactgatgctcgcattattctttttaccgcagcgtacccctaaagaatctagttcattgcgtgtcttgcgtgacttagggatttcctctgctgttggggttgttgtggccagtatctgctacgcgctgttgaccagaccgcttgaatcaatttctgatttctttattgccaatgctaaaactggcggtggcggtactaacgttgtaaacgtgattttagttgacttcaggggctttgatacccttggtgaaataaccgtactaggtattgccgcattaggtatttataaattacttattaatctgccattgtttatgccggcaagtgatagcgaagggcgcccatgggctagagagcgttatccaatcttactgtcgagtatttcgcaaagtctattaccactggcattattggtgtctgcttatattttcttacgaggtcacaatttaccgggtggtggttttattgcaggtctagtaacggcgattgcgtttattttgcaatatatggcaaatggttcacactggattgcagacagatttgatgtgaattatcgcaaaattattgcgtcaggtattgccattgcgttgttcacaggtgtgggtagttggttctttgaccgtccattcttaacaacgtggtttgattattttgatattccgttagtcggcaaaacagaacttgccagtgctatcgtatttgatttaggtgtgtatttaactgttgtaggtgcaacgctgatgattttggcaagtttaggtaaattgactgccgatacacccaagcgagaggtaaatatttaatggaagtattgtacgcatcatgcgtgggcgtgctggttgcatgcgggattttcttaatattaagagcacgtacctttccggttgtgcttggtttaaccatgttatcgtacgcggttaacctatttttattctcgtcaggtcgcttaacgattaataaagctgcagtactaggcagtgctagtgagtatgcggatccattaccgcaggcacttgtgcttaccgctatagttatcggttttgcgatgaccgcctttgtggttattttagctattcgtggtcgtgctgatttgggcaatgatcatgttgacggtcatttattaaaatcatctaaggagcaaaaatgattcagcatttagcttctttacccattttaatccctatgttggcgggcgttattttattaatgccaccgtgcggtaaaaacttacatattcgtcgtgtagcttccgttattttatcgatagttacgttgctaataagtgcttatttgctatttcatgttaatactactgcatcactggtttatgctatcggtgattggtcagcaccttttggtattgtgcttgtggccgataggctctctgcattactggtgctactaacgagcctattgggcgcggtgattgtgctttatagctgtgcaggtgacgacaaaaaaggcagcttttttcacccgctggtccattttttaattctgggtgtgaatggtgcttttctaactggtgatgtgtttaacctatttgtattttttgaggtgttactgattgcctcttattcgctattgatgcatgccggtgacaaacacaaaacacgagcagcactgcagtacgtgatattaaacctaattggttcaagtgtattcttaatcgcgttaggtattctatatggtgtcctaggaacattaaatatcgctgatttagcacaaaaagtccctttactaaaaggtgatgatgtataccttgcgaaaataggtggcttgttactgattgtcgtgtttgcactaaagggcgcgctcttacctttacatttatggctaccgaatacttacgcaagtgcaatgccattggtggctgcattatttgcgattatgactaaggtaggtgtctatgccatgctgcgtgtatacaccgttatatttggtgagaatgcaggtgagcttgctcatatggcacagccttggttgtggggcttagcactggcgacaattgtgatgggcgctattggtgttttagctagccaagatttccgtaagttgattgccaacttggtggtggtgtcggttggtactctcgttgcgttggtggccattcaaaatgtctctgctacagctgcgttactctactacttagttcattcaactgtaatttgtgctgtcctgtttttattggctgatttaattgcgcagcagcgcggtaaggtcgctgaccgcttagtggcggggcgtgcagttgctcagccattcttgttaggtatttgttttgtgattgcggcacttgccgtggtggggatgccaccattgtcaggttttgtcggtaaaatttggattttaaagagtactctagatagcgaaaaagccatgttgttttggcctatttatattttatctagtttggcactgttggttgcgatatcgcgtgctggtacaagccttttttgggatcacaaatataaagatagtgaagcaattgagggcgtaaaagcacaccctttacaagtgactgcggtcattgtgctgttagcatgctcgccgttaatggttatttttgcagggccaatatctgaatatatgctagcaacctctgagcaattgtttgatataaaccaaggcattcagaatgtattacaaggaggccaataatgcgtttagaagctcgttttcgttggctaccgactccatttcgtagtgtattactttttgttgtttggttattactcaataatagcgtgtcgccagggcatctgctgttagctgctttttttgctataacaattccgtggatcacttttccatttcgcgatccacagccccttattgttagaccaggattggcgtttaagtacttacttttagtgctgtacgatattgtcactgccaatttacaagttgcgcttttaatactcgggccgactaaaaagttgcgtccgggctttataaaagtaccacttgatttaagtcatgaaatgccaatcactattttggcaagcactgtgtcactaaccccaggcacagttagtgcagaggtttatcctattcctgagtcactcgaagagggcgaagaaattgagcagcgctatttactgatccatgtgctcgatttagcagatgaacaggcgttaattaatactattaagcagcgctatgaagcaccgcttaaggagatttttagatgctagataccgtatttttaattgtctatgcgatgatcgccatctcgttattactaaatttatggcgcttaatagtgggtccatcggtacctgaccgtatattagcgctagatacgatgtttattaacaccattgcgctgataattctttatggcatgagtatggataccgggctttattttgaggccgctttattaattgctatgcttggttttgttagtaccgttgcagtatgtaagtatttgctgcgcggcgatattattgaataaggtaacaaataatgagtgaatggattgtatcaatcttactgttaattggtggttgctttattttgattggttcgattggcttagtgaaaatgccagacttttttatgcgtttacatgggccaactaaagccactactttaggaatggcatcattacttatcgctgcaatggtgtattttagctatcaccatgatggagtgagcgttaaagagatcctaatttcaattttcttactgatcaccgcacctatcagtggttacatgttgattaagtcagctattcatcacaaacttcgcgctaaagaaggtaccaagggcttagacaacgttgaggacgattaaaaactaatcgtgctaacagggtgaagtacaagggtgcttttattgcgcgagcagatcgcataaaatgccccgtcatttagcacagtaggtaaatagatcattatgcgagtagcacttggagtagagtacaacggcgcccgttacagtggttggcaacgtcaatcacatgtcaatagcgtacagcaagaagtagaaacggcgttgtcgcggatttgtaatcacccagtcgaaatcgtatgtgctggccgcactgatgctggtgttcacggcacagggcaagtggttcactttgacactcatgcagaacgtgaaatggttgcattcacaatgggcatgaataccctgttaccgaaagatatttctattcggtttgccgagcctgtcagtgaagattttcatgctcgttttagcgccacagctcgtcgctatcgttacgttatttataattacacctatcgcggtgcaatcatgagcgaaggggtgacgcattttcatcacccactcgatgaaactaaaatgcaagaagcctgtcagtatttaattggtgagcatgactttacctcttttagggcactgcattgccaagcgaatacagcaaatcgtacgattcaccatttgtcggtaaaacgccaaggggactatgtgataattgatattaaagcgaatgcatttttacatcatatggtacgaaatattactggctgtttgatggatattggtctgcataaacatgaaccagtctggttaaaagaattacttgatttaaaagaacgcgctaaggcaagtgccacagcaaaggctgctggtctttacttagtggatgtggattaccctgaacactttggtattcctaaaacaccattaggacctctgtttttacctgattcagatagttaactgaaagtgctgcactactaagaccagttttttatatcgtctacgggtaattcatgttttaattgaaaaaatctgtctgtttaattactagaagtagtgcatcgagcatacttgattaaacagactgcgacacagaacagcatttaagagagttgcaaatgagttggttagaaaaaatcttacctaaaacgactaaatcatcaggtcgtaaagaaatccctgaaggggtttgggctaagtgtacagactgtgattcaattttatacaaagcagaattagaaaaagcactcaacgtatgtcctaagtgtgatcatcacatgcgtttaagtggccgtaaacgtttagaaaactttttagatgatgctgatcgtcacgaaattggtgctgaacacgaaccaaaagacgtattaaagtttaaagattctaaaaaatactctgaccgcatcacccaagcacaaaaagcaagtggtgaaaaagacgcacttgttgcaatgaaaggccgtttaaaaggcattcctgttgctgctgttgcatttgaattctcatttatgggtggttcaatggcgtcagtagtaggtgcacgttttgttgaagctgttgaccaatgcttagagcatgatatgccacttatctgtttttctgcatcgggtggtgcacgtatgcaagaagcccttatgtcattaatgcaaatggctaaaacaagtgctgcgcttgcaaagatgagcgaaaaaggtttaccgtttatttcagtattaactgatccaacaatgggtggtgtatctgcatcgctggcaatgcttggtgatgtgaacgttgcagagcctaaagcattaattggttttgcgggtcctcgcgtaatcgagcaaacagtacgtgaaacgctaccagaaggtttccaacgcagtgaattcttgctagagcatggtgcaatcgacatgattgttgaccgccgtgaaatgcgtgacacccttgcacgtatcttagcgaaatttatgaacttgccttctactgaacaagagcatagagtagcgtaaatttcagcttaactgattaaacgctatgacagaaatccttcctagccaatcatcaagccttgatgattggctttgttatttagaaagtgtacatccagccaatatcgaaatgggtcttgagcgcgtagagcgtgtggcaaaccaagtcggcttactcgatacatcaagcaaaataatccttattgcaggtacgaatggtaaaggaacgacagctcgttgcttagaaagcttactgcttgcacaaggttttagtgtcgggacttatgcttctccgcaccttattcgttacaacgagcgcgtgcgtattaatggccaagagcttgatgatcaataccatgttgatgctttcgatatgctcgaaaaaggtcgtggtgacacaccactgacttattttgaatacggaacactgggcgctttagctatttttaaacgccatgcggttgattatgtactcttagaagtgggtcttggtggtcgttatgatgctactaatatagtcaacccatatgcttgtgtgatcactacaatagatttagaccataaagaataccttggtgatactcgtgagttagttggctacgataaagcaggtatattccgtaccaatacgcccgcaatcgttggcgatttagctattccacacacagtaactgattacggtaatgaaattaacgccgatatggtgttatcaggtcgcgactttaaattcacagaagacagtgaaggctttaattggcaatataaagccaatgactggcgtttagctaaacctgcgatcccttgtcaaaatgctgccacagcattgactctacttagtaagcttgatttattaccaaacgaacaacaagtaagagactgtttagcaaacttaacggttgaaggtcgctttcagcagctaagtgagcaaccacttatttttactgatgtagctcataacccagagtcggctcgttatttagcacgtaaattaagcgtgtataaagatcaagggtttaaaattcatgcattagtcgctatgcttgcagataaagataaagtggctgctatgtcggctgtggccgatgtagttgatgaatggtcgttggcgagtttagactgttttcgtggagataccgtcgaaaaccttgccagcgcattagcagaaacgccatcaacagcgcctagcacccattataagagtgttgaagctgcattagatgcaatgttaccaaagctagataaaagcaccttattgattgtgtttgggtcatttataactgtggctgctgctatcaattactttaaagaatagagaggaaatcggtgaacgcagggtttattaatcgcttagtaggaaccaccattgtggttgtagcggctattgtcttcattccaaatattttggacggagagaaagttcatcatgcagaaaactttaaagcgatccctgaccgccctgagttcaccacgattgacttacaacaagctatagacaataaagtggcatcagctgagcaacccgccgaagttgctgttgaagatgttaaagctaatgatgccgagttaatggcaacagaacagcaatcatttagcgatgccccgaaaatgattgaagcatcaacagatgagcctgtgattaatcaagctgagccaaaagttgcagtgcaagagcctgcaaagccggtcgctaatactcctgagccaacccgtaagccagaagaaaacctcaccaaaatggcgtatgttattcaattggggagtttttctcatgcacctaatgtgaaatcgcttcaagaaaaactaaaagcgaatggtttcaaaactttcacacgcccgataaaaaccccgaacggcacactgacaaaagtctttgtaggtccttcacttaacaagaaagagttagagagtaagcttcctgagttaaagcagttaaccaagctaaatggtaaagttactcagtttgaaattacgaagtgatctaactttgaagcgcccgaagggcatggctaaaacgtatttattctgcgttattgattttgctaatgggtacaccattacctacaatcaatgccttgcctaaatacgttttatctcatgctgaattcttgcatctacaggtggttcttatacccaaaccacctgtagatccatgattcagcgctatcacagggctttcaatacacggcgtggcaatacaggaatgtaggtacctttcaagttgccacaacacagtagtggaagccctgtgaagcgcccgaagggcatggctaaaacgtatttattctgcgttattgattttgctaatgggtacaccattgcctacaatcaatgccttgcctaaatacgttttatctcatgctgaattcttgcatctacaggtggtttttatacccaaaccacctgtagatccatgattcagcgctatcacagggctttcaatacacggcgtggcaatacaggaataggtacctttcaagttgccacaacacagtagtggaagccctgtgaagcgcccgaagggcatggctaaaacgcatttattctgcgttattgattttgctaatgggtacaccattacctacaatcaatgccttgcctaaatacgttttatctcatgctgaattcttgcatctacaggtggtttgggtatagaatgcgccccaaattaacgactagttggttcttatgatctgggttgattacgccatacttggcattattgcactatccactatcatcggtttaatacgtggctttataaaagaagcaatgtctttagcggtgtgggctggcgcatttatcatctctagtttgttttaccaatatttagcatccttcctaacaagtatttcagaaccccttttaagaaatgcagccgcaattgccatattattttttgcgacactcctgttgggtggtttactaaactatattttaggtgaacttgtacagcgtactggtttatctggcacagaccgtgtttttggcattgtgtttggtgctcttcgtggcgtgttggtcgtgagcgcgttacttttctttcttgatgcttttaccggtgcaccaaatacgcattggtggggcaactctattttgattccagaatttggctttgttgttgagtggttcttttcgtacctcgaaaacaactcaagctttttaaattcggtaaaccgttaatcggcgaggataaatttaatgtgtggtatcgttggcatagtcggcacttctcctgttaatcaggcgttatatgacggcttaactgttttgcaacaccgtggtcaagatgcagcgggcatcattaccattgaaaacaacacgtttagcttacgcaaagccaatggcctagtgaaagatgtgtttcatacccgtcatatgaaacgtctgcaaggcactattggtattggccatgtacgctatccgacagctggttcatctagctcgtctgaggcgcaacctttctatgttaactcgccatttggtattgcgcttgcgcacaatggtaacttaacaaatgcagaagcattaaagcagcaattattttcagaagctcgccgtcatgttaatacaacatcagactctgaaatcttacttaatatcgtggcgcatgagttaagtaagtcaaataagcttaagttagatgcagaagatattttcaccgcggtaaccgaagttaataacaaagtgacaggtggttatgcaacgattgcaatgatcattggccacggtattgttgcttttcgtgaccctaacggtattcgtccattagtttttggtaagcgtgaaactgcaaatggcactgaatatatgtttgcatctgaaagcgttgcattaaaaactgatggttttgagtttgtgcgtgatgttgcgccaggtgaagcaatttacgttactgaagacggtcagtttttctcgcaagcgtgtgcagaaaaagctacttactcaccatgtatcttcgagtttgtttactttgcgcgcccagattcaacaattgaccgtatgtctgtttatgcaacgcgtgtaaacatgggtactaagttaggtgaaaaaatcgctcgcgaatgggccgacaaagacatcgacgttgttattccaattcctgaaacatcatgtgatgtagcacttgagattgcctcagctcttaacttgccataccgccaaggttttgttaaaaaccgttacattggccgtactttcatcatgcctggtcaagagatgcgtaagaaatcagttcgtcaaaaactgaatgctattgaccgtgagttcaaaggtaaaaacgtattacttgttgatgactcaattgttcgtggtacaacgtcagcacaaatcgttgagatggctcgtgagtcaggtgcaaagaacgtttacttcgcttcagctgcgcctgagattcgtttcccgaacgtgtatggtatcgacatgccatcggctgcagagttaattgctcatggtcgtgaagttgaagatatcaatgctagcattggtgcggatggtcttatctatcaatcgctagatgacttgattgcggcggttagccaagagaaccctgaaatcactcgtttcgaaacgtctgtatttgatggccaatacatcaccggcgatattgatcaagagtacctaaaccacattgaccgtttacgtaacgattcagcaaaatcaacgcgtgaaaatgctatgtctgcgggtttagaacttcataatcaagaagaaaatagcgctgactagtcactgttttcaagatgataaaaaaggagctttacagctccttttttgttttggaaagaaaggaaataataatgaaatcaagtaaacatggggtgaacaataccgtttgtccagagtatagctgttgcagctaaaataattactaacagaataagcccgcaagtaacgaccgagcttgcataaataaaacctctttcctcaggaatgtgcatgagaataggcacgcctgtgtaaagtaggtaaacagaataggcaagtgcaactaagccaacacacactacaaaccaaagctctggcaaaaatgctgcaaatgacgacataaacactggcgttgctgtataagcggcaagttctagggtttgtgtgaaagtgggtttagcaccaaatgttactgccatccaatgagctagataagcaagcgcaaatacgcctactatgagtgcaaaatacatcgctactgcgatcatcaatgcactatcatgggttaaaaatacagcttcaccagaaccaatactccatcctaagtgaaccgacgaatagtagcccataattgaagggatacatgcaattaataggatatgagataggctatagcgcaaactctcatggcgattatcaatcgtttgccattcttcgagtggatgggcgtataagccccataggtggtttaaaatcataattgttgcccctgtaaaaaaggaatagtagctgttttatttttgtacagctttgattaagttatggttcagtaattaaatcttgtcaagaagctgaaataatcgaaacagtcgattgaatgtaactctttagtgcatataggaaattactttgcactgatatgtggcgtagatactattaaattagtgtaaaaattctaaattttatattgctgcagatgattattggcttttattaatacctttatgctctttatacattaatacgcgcctgctaaggcgcgtatcaatagtttcactgctttagtgaagttagccatcatttcttaaattatgaactttatcctcagcatttaagtatcgatttcactattatttgcatcaaatagataccaaagctaaaaaggtacggctgtttagaattgaatttttataacgagtttattgtccttcgtaatttacaatgatttcgtcccttttgctttcatgattaccgtcagatacggttaagcccacgataacctgaccaacatagttttcatccgttactagggttactttttcagatgtatgatttagtaggctaggttttgtcgcatcgttaccatttaagccaatgattctccattgataagttaatgtttcatcgtcattatcaaaacttttttcggcagacaattgaagatcttcgccgctttgagctgtgatatcttctccagcttcagctacagggactgcattctcatatgagcgaactgttaagtgctcaatagaaacaacttggtcatctttaattaatcgtaactgaaatataaatttaccatctacatctaagtgaaatgaaggggttaaagattccctatttgtaatttcagacgttgaattatatggggcgttaattaaatcccaagctattgtgacagattcatctataccaatacttttgctgccatcaagagtaatttgtgtcccttcttgggctgttatttcattttgagtaaatgctactgtaggcgtcaattgttcataaacataaaaccaagcgctgtctttactgtagccagagcttgttgagtcatcggctcttaagcgaaaattgtaaaatccaggtacagttggtttaagagtatggttaacactattagtgtctttaagctttaattgtgaagttggtggctgataagcctcttcccaaaaataactcagaacatcattttcatgatcaaatgatgatgcaccgtttagtaagatttcatctccaagtttaatgaagtgagggtttgaagactggctactaggcatcatattttcatcagttccatataacctaacatatacatatttgctagtaatgttatcgccatctttcatcgttactcgaagtcgataaaatcccgctttatcacctttgaattcagtctctgctttatcaacaattgatctagataacgatggtctgctgccattaggccctgaactgactgtccacgaatactctaattcattaccttctggtgaatcgctctttgcaaagtcaataagtactctttcattaacttttccataatattgatctgtacccccaatcctatgctcatattcatacttaggtgagatagtagctgtaaccagttcagattctacagagttgaacccgtcattgacggttacctttgcaatatagttacctggtagatcaggaatgtaagttaaatatcgatttgtgccagtaaagccaattaattcactaccagctggagcgcctgtaatttcccaaaaataggtaaactctgtactgtcagtatcttcaactctgctgtatatataggcctcaccacctaaattaaaatttaagtcactgatagcggtaacagtcggagaggcattctcttcaataaaaataaggtgtgttactgactcactatcaacgataccgtcattgacgattagttctatctcatattcaccaggttgatcgggagtaaattgaatttgcggggctggttctaagccagaatcagataaaaggctattttcgggaagagatttaaatgcccatctgtaagataacacatcaccatctgcgtcattacttaagtttgcatcaaggtaatatacctcgccttgttttccaaaccctagaccattaataacggcaataggagaggaattgggtttaataaccgtaacttccacgtaatccttttcactactagccttaccatcattgacggttaaactaatctcgtaaatgccctctacttcaggtgtaaagcttgggtaaactacgctttcaatattcatatttgaaactggagcactttctacagtccaagtaaaacttaaatcatcaccatcagtatcggtacttgctgaaccatcaagtgtgactgtatcgccaagatcaattgtaatatcacttccggcattggagataggggaagcgttacttgcttctggaggggttattatttcaatattttcgtcctttttagtcccttcacttccaccaccgcaggcggtgattgtagttaatacaacgatgcttaaaaggcttttcctagtaaaattcataaagtttaacttcctaatattttaactttttgatgtgaaaacctcttgttttttcgattcttttctaagaggtttttactagtctaattattattaagctaaccttaagcttggtagtgaaatagggtgaatgagtgtgaaatagtgtgaaaaacattataaatcaatactttaaattatttgattgttttggtaagttcttgtgaacttaccaaatcagctacataacttggtacattaattgatagaaagcttaacaattgaggagttaaaattgtcagtaccaaggtaaagtacctcattctcaaatgagatcacttttttatataggacccttttattgattttagctaggtacttacccgttttaatgttttctatataagtttggtcatcgacgatataccaatgataaatttcaccttggtgttcgaagagcattttatttttagtcggctttgctacaaactctcgttgactgttaactatatcgccagataacttattaacgaatagacactcttcattagtagcaaaaactctatccccattctcatcaactttagagaaatccctctccttatgcatgtactcgtaaattcctgaacttgtttcagcaatcatgcacttgttatttgatgcaatcctgattgttttaagcccagaaatttttttgaccttattgttttcaaacttgtaaatcccagagtcgccagctaagtaaatttcattattaaatataccgatttctctcagacttagtgatgaattaaagtaagctggtgacgaatgaactttattttttattttctctatgacatatcctgtatttgtcatacctaatatatataaggtgttatttacataattaaaatctaaagtagtgttttcaaaattgtaaattgagttacctgcaagattgtgaattacttctttctgggcattgcctagtgtaaagtagatttggttattaagactaagtagatcatcaatttttacggcttgagtcgtcaaaacaggcttaggagtaagctcttcaaaatctgattcgccttctaggttaaactctagtaattcattattattgcctacaaaaaataatgaatcctcgagtagtgcaaaggagtaaggtttgtatctaaagtcatacaatgtttgttgtttattacctttaaaatacattagagacatatgatcttggctgttttgtcttaaagaaaataagccacccttatactcttttatgaaagtgtcgataaatttatatccatttttatctttaaagttaatgttgggaacgctttctaaggctttgccttttagatcataagtatatggttgaatagaggcgttattacttagattgagagttatatagaagctattatcatcaatccaatcaaacgaaggataagcatttcttctattgcagggtatttcgtctattagatcttttacaggctggttgtatatttttattttgcactttgaattctcaataacatgcaaaatagttttgccactactatgaatttcaattcctctaaaaacagcataaagatcttcagacttaattaccttatttaatctattcttaacttcatagattttagaagaatttttactcgtggttgtaacaaacattgagtcgccatatgtagcgtaatccaatatgtactcattagaattgaaaatagtttgagttgaagtcttcggtagctcaactttctttgtactagtttggaggtaaaaaattgcaataaatatagctataaacaaacaagtaatataaatcaattgattacttgcttttttgtttaccaaggtctgttctagttcaaatgtggctttgtagcctttgccgcgtacgtttttgaatgagcttttatcctcaaatttaattcttaatccgcttataagttttctgagagagttattggttacaactttgtttccccaaattcgtgattcgagaacttcactggatacaaagccatcttttgactcaaaaaataacctaagggcttgttgctcttggaatgtaaactctataactttttgatctcttcgggccgttttatagtccaaagataaaatatattcattaatttttaaggtcacaacgtatttctatttttataattttgtaatgggtttagtttgtttaaggggtaactaaatttgtaaaggttcttgtatttgcagttagatcatggaggcaataaattttagtcgagaaatgaagtttaagatcatggaatttatagatattcttcgttaattacaaatgtaaacattaggatgctacttattgctacatttgtaaatgcttgtttttctcaacttaagataattaacttcaatagatgtacatttatgattcaattttattctttggctggttttttaatcactctagtttttgacaaatagaagttgatctcaattaatcaagttctaacgcagtgtggtagaatactggcagttttaaatagatagtttagtgtttgtttgaaaacaaatacttatgatgagtaagaaaattggacgaattattaaaaccgattaatgcttttttaaagtgcgaaacgcctgatgagtggattgctgcggcaaccaaaaaagaaaacttagatatagttttaatcgatcaccttatttgtgagttaaaagcggcgcaaagcgcgatgttcttaattcgcaaatatgccgttgataaagaaagtagcgacgctttacttgaatggttgaagccttttgagacacttatttacaagcgtgaaggtgattggcgagagcttgcagataaaaacaagctgactaagtcgatgatcccaaaatcaaactctccatatgggcaagatctcattgataaaatggtcatgcttattaaagaagagctgcaccacttctatcaagtgttggagatcatggatgagtacggcattgaatataaaagtattactccttgtcgttatgccaaaggtatgctgcgccatgtaaaaacttacgagcctgatgctttggttgataagttaattatcggtgcttacatcgaagcccgctcttgtgagcgttttgctaaattagccccgcatgttgataagcgtttaggtgatttttatatctcactcctgcgctctgaagcgcgccattatcaagattatctaacccttgcccaagaaatcagtgagtttgatatcacagagcgtgttgagttttttgctcaactagaagccgatcttattttaacacctgatgaagattttaagtttcacagtggtgtgcccgcataaacagcttcccatcaagttctgtaataatttggtgggatctgtgtacttttctatattttttacaattccttgctgtcgcatgttgtaagtgtaaatactcactaacatgtagttttataagtgtttattcctacttaatttgattaattggttttatctttttgctttagtgtactattttttagttatatttgatgttcccaaatcataattgtttgcatcgtgtgcttaaaaaatggagaagccatgctagatccgcaatcaacttttaaatttatagagccaagcgtaaaaccccaaaaaaaagtaacaacttggaaaattttaactgttgaagatgatgctgactatcagcaagcactgttaaatagttttaaagctatcagtcttgacagtggagatgagttacatgttttgactgcagattctgcgttaaaagccgcgtcaattctatcccagcataaagatatcgcgttggtatttatagacgttgtgatggaagaggatgattctggtttaagattggtcaacagtatccgtaatgtgctgggtagaaatgatatgcgtattgttctactaacaggccaaccaagttttgcacctgagcagcaggtcatggatgaactcgatattgatgagtactggaacaagtcagatatgactgcggaaaagctaaaatctattgttagcagtcatcttcgtacttatcactatatttcgcaaatttcgaatgccaaacaagggctacagctggtacttgatgcggcaagaagcattaataataaaaataacattcactcattttctcaagctgttttagacgaaattggcaaaattttacaattatcgaatggtgggggagtgatatgtgttggaaatagcaaattagctttagctgaggttatttcttgcagtggttgctataaaggacttgaaggcaaaagtctttcatcagaatttttaagctctgaggtgcaagataatatcgaaaaagcagttgaaactcgccagcacgtattttcaacgcactatagtgtcttttattttaccacacagaatgttgatgtgaattactacatcacaattgttaaatctgataaccaaatagaagaacataatatctatctattgcaggtatttagtgagaatgtgagcactggctttgcaaacattgcattaatgaaccggttaacagagcttgcctatacagatgttacgctgaatatgcctaatcgaaattggctgttacgtgaaattgatatgatgaatgcagaggagctggcaaatactcatttagttatctttgaaattttgcagtttgatgaaaagtcatttcgttttggttatgagttttgtaagaaaacccataaaaaaatgcaaagtaatattcagcaacaacttcaagcctattatcctcgcatagcattatttaaaaatgacagcttgggagtattggttgctagcgaggtattcaaagatgaacatttaattgactcgctaaaacagcaatctttcgaaattgacggggtaaagcaatttttaaatgtgcgcattttggttatgcaactagatgcgtttcctgatcattcagccgagcaaattttcaatcttgcagaatcaacacttagtgaagaaaagtcgcaaatggctgagctactttgttattctgctaaaagcactgaagcaatcacacgccgttactcattaatgcaagagctgcgcactgcgattcgtaaaaaacaacttaaagtggcattacagcctaaagttagtttaagcacaaatgaagtggtaggctttgaggcgctagcacgttggcagctagatagtggtgcttttgtccctcctgacgagtttattgagcttgctgaaacagctggactaataagtgaattagataagcttatttttgataaaatcttacaaataatatatcagttaacagaacgaggtttcaccatacctattgcgtttaatgtatctacgtatgatttgttgtcagcaagttattttgatgaaattcaagcgcgcttagctgagcatcaaatatccccagaactacttgagctagaagtgacagagactcaagctatctttaattatgaaaaaataaatgcacgtttgtgtcaatttgctgcgcttggcatgaaaattagtattgatgattttggtacgggctactcctcacttgaacatattagtagaattcctgcacaggtcatcaaaatagataggtgtttcgtagacaaaattaatgaatcaatatcaaaccagcatattattgaaatgattatgatgctggctgaaaaatttggttttcaagtaaccgctgaaggtattgaaacagaagctgagcaccaatggcttaaacagttaggttgtagctttgggcaaggatattactacgcaaagccaatgttttttgaagatgcacttgagtggctgcaaagttggtctgaaaagtaatggtagaaaaagcggtttcgcaactaaatgcgctgcgtaaaaagtccattattaaattagctattgcgcttggggtatgtgtagcaattagcttacttgtgtttttacttttttatcaaataaaaaaaactaatttaggtcttttgcaagataacactttgcatgcgacacatagtatttttagccgggagctcggtgatgttagaaaagtagtaaagttactagttgcagatcagtcattaaagcgcaatgacgtgtcaacggtatcagcagaacaaattcgttatttaaataatgtactaaatcattttactgattttggcttggctgcaggcacaatttcacagatccgctggttagatatacaagggcaggagcgactgcgagttaatttcaaagctgggattgcagaggttgtacctgagcaacagttacaaaataaacgaaaccgatattattttactgagggaatgcagctaaaaaataataatatctacatttctcctattgatctaaatgttgagtttggtgaggtagtgacaccttttcagccaaccttaagagcttcctttcgaaccttgcctgatgattatcttttagatggcttaattgtggttaattttgatttatcgtcgacattaaatcatatcaaggagcttggttctgcgaaggctcaggtacaattaattaatggagaaggatattggttacttcatcctaataaagcaatggaatggggctttatgttagcgcagcccgatttaagcctgaaaaaaaatgacccagcgctgtggaacacaatgattagcgcggcgagttcaaaacagctcgttatttcaaagagcatgtcggctagtttcttaaaaatgaacttgggtaacgctaatagccaacccgttgaaaatgatattttcatgttagtgagtgctagtgacggggttgttgatgcggtatttattcagtctttagtaaccgctttagtttttggcttacttcttgttgctttatcaatatattatcaactgcgtagttttcgttatcagagcaagattattcaaacctcaatcaacttggaaattgagcagcaagaattactaacggctaacactaaattacagcggtatataaaacagcaacacgaattacagggagagttgattgaggcaaaaaggctttcatcgcttggtttaatggttgcgggtgttgcccacgaaatgaatactcctctgggcggggctgcgatttcactgtctaatgccgaaatgataaaccaaaaattacaaaagcaaattgagcaggggctaactaaagagtttttagaaacgagtatcgaggggatcgatgttaacttaaaattgtctaaagtaaatttagataaagctatttgtcatgttaaaagctttaaagaaatggcgcacgacagaacaaatgataaccatataaaatgtgatataaataaagtcattgaagacttattactcggattaaagtcacgattaaagaccttcaatgtgacagtgcaaactgatatagaaattaacagagagatcgttacgcggccaggtgtcatttcccaaattattgagagcttaattgttaatgccatttcacatgcattcacagagcaagacaataaattgatagttgtacgggtgttcgaagaaaaatataatagcttgtgtatcactttatctgataatggtgttggtattgatgattcattacgcagcaatctatttgagccctttgtaacaacctcaagaaaacatggccatacaggtcttgggctgtacttagtttatcaatgggtaacagagatattaggggggcgaataagcttaattagtcgtcacgatttacctgctaatattgccacacaatttaaaataactattcccttgaaagcccaagagacagtggttaaatagtcaaattttacttagcaagcgtttaattttgttgatctcgatatcactgaattcatagtgacgtaaaattttctcaagtccaccactggcaagtaattcttctacgccaattcgtagactattttgaaagtggagtgcttgaggatggcttttagcgcttattacatgtaaatactggctggctaaataaggcttaagcacactaacttgcttttctttgaatgcgcgcaaacgctcattattagctaaccaatattggccgacttctttgctgccagcaacaagatcaactcgcccattaagtaaaagcagtaagctgtcagcaaggctatctgcggtaacaatcgttagctgaggatggctttcaaagctatcactcactacataatcttcccctttactaattgtataaggagcaagcgaatataaagatcccgtatagagaatgtcagtatcggcacgtttaaataataccgtattggcaacggctaaagggtgtgaataataataatcagctgctctggcatgattatgaaatgcaccgagtaccgcaacacgcttatttcgtttagcaagtttcagtgcgcgagcccaatgtgtatattctatgctggctttttgcccttgagtttttaatgcggcaacaataacttcatgtaaccaaccaggcttactctgctcaccaataaaatagggaggaaaaggctcagtgaccaactgccaggtttggctattaatcgaaaagctaagcactaaacagctacacaagtatataaatcggttcacctaacatgcccgtttttatttgatacacaactaaagcatagctaataaactgatgatttaaagcggagtgtaaattagctcttgtttatctggagttactcttaggtatgacccttgttcataccaatcacccagcacggtgcgagtatgggtctcgccattaacattatagtagtgaacattagggcggtgggtatgaccatggatcatattcttaacctgatgttttttaaacatggctaataccgcatcttctgtaacatctaagatttctaatgctttaccagcttggctttgttttgatttttcgcgggcgttgcgagcaatcttcttgcgataccaaagcggcatagcaagcattaattttggccaccaccaaccacggctttttttgcgaaacttttgatattcaacatcttgggtgcacatttcatcaccatgcaggataaccgttggggtgccgtataaatcaataacaacttgttcgggtaataaagtcatactcgcgcttttggcatagccttcacgcataatgaaatcgcggttaccatgaataaaaaacaccttagtaccactttcacttacctggcttaaacgtgtggcaacgctcactgaaaggtcagtttgatagtcatcacctacccatacttcaaaaaagtcacctaaaatatacagggcatcaacgtcatcattaataatcttgctatcaagaaaatcaaaaaatgccgcagtgatgtctgggcggttttctgttaagtggagatcggcaataaaataactttgtttcatggttactcgcaaaaaagcgggcaaaggcccgcttaaaaaagtactaaacgattaaattagctaaccgttactttttcgataattacatcttcaagtggtacgtcttggtggaaacctgcgctgccagttgcaacacctttgattttgtttaccacgtccataccttcaacaacttctgcaaacacgcagtagccccagccttgtgaagtttcactgctgaagtttaagaagtcattgtcgttaacgttaatgaagaactgcgcagttgctgaatgtggatccggcgtgcgcgccattgctaatgtgcctactttattcgcaagaccattgtttgcttcgttttcgatagggttgtttacttctttttgaaccatacctggctcaaagccaccgccttgtaccataaaaccatcaattacacggtgaaagatagtgccgttgtaaaagccagagtttgcatactctaagaagtttttaactgtgtttggtgcatcgttttcgtgcattttgatggtgatgtcaccaaagtttgtgtgtagtacaaccatgaggtttcctatatctggtttaataatggcactattttatagtagttgtctttgattaacaaagagcttgtttaaaacgattaacaaagtgcttattcaattgataaagcgctagagcagcggctttgcaagtgttaacatagagaatctcgaaacaccgttaaggacattttataaatggtacaaatttacaacacacttacgcgacaaaaagagcagtttaaaccccttgttgatggcaaaatcgacatgtatgtgtgtggtatcaccatttatgattactgccatatcggtcatgcacgtacatttgtagggtttgatgtaattgttcgttaccttcgtcacatcggctacgatttaaaatatgtacgtaacatcaccgatgttgacgacaaaattatcaaacgtgctaacgaaaaaggcgagtctatcaatgatttaacgactcgcatgactaaagcaatgcatgaagactttgacagcttaaatatgttgcgtcctgatgttgagccaaccgtaacaaaccatatggatgaaatcatcgctatggttgaacgtttaattgcgaaaggccatgcctacattgcagctgatggtgatgtattatttgatgtctctacatttgagcaatacggtgctttatcacaacaagacttaaccatgctacaagcaggttcacgcgttgaagttgcacaagataagcaagatccacttgatttcgtgctatggaaaaaagccaagccaggtgagccttcgtggtcatcaccatggggtgagggtcgtccaggatggcacatcgaatgttcggcaatgagctctaagcatttaggtgagcattttgatattcacggtggtggttcagatttacaattcccacaccatgaaaacgaaattgctcagtcatgctgcgcaaataacggcaagtacgttaatacgtggatccacacaggtatggtacaggttaataaagagaagatgtctaagtcattaaacaacttctttaccgtgcgtgacgtattgaaagagtacgatgctgagtcagttcgttacttcttaatttcaggtcattaccgtagccaacttaactattcgcaagaaaatttagagcaagcgcgttcgtcacttgagcgtatttacaccgcactgcgcggggtgacaccaatcgaatgtgatttagccagcaatgaatacgtggctaaattcagaaaagcaatggatgatgactttaatacgccagaagcactacctgtgttatttgagcttgcgaaagaactaaaccgtgttaaagacagcgatgcagaacaagctggtaagttggcttatgtacttcgcagtgttgcagaggtattaggcgttgcacaacaagacccagaagccttcctacaaggtggccaagctgatgacgaagtcgcacacatcgaagccttgattgcaaaacgtaacgaagctcgtgccagcaaagattgggcagctgctgatgaagcccgtgatgcacttaatgcactcggtgttgtactcgaagattctgcgggtaaaacaacatggcgtaaagcttaagtatccaccgagatattacaaattgaaaaggttgccaagaggcaaccttttttgtttttaactgggcatagctattgacctaaaccttacttgaggttttatttttacgctacttttcactaacaaggacttacattgaatatcttacttgccatgatccctgcttttttatggggtactacctatgctgtgactaaatatgccactccagattggccgccattattattaggtgcattgcgcgcattgcctgcaggattattacttttattacttaagcctagtttaccaactcgttcacagtggccaagtttattgactttaggtgctgtgaatatagcgctgttttttgcgtttatttttatcatggcggtgaatcttcctgcagctattgctggggtggggatggtgtcagtgccggttgtcgctttgctgtatgcatggattgtaaaaggacagcgtccagcaagagttcaagcattttgcgccatagccttggttgtactggcgtggttattgtttgatccagcttacgtcacattaaatgtattgggagtggcggctttattgggtgccttacttactattgtgattggtagcaccttagtacaaagtttgtcggtgcatatacattggtgggttgtgcttacttggcaattaatcattggtggcagcatattattgctagctgcttttatcgatggaagtttgctaaacccagagcaataccaagtggtatttgagcctatttcagcgctgcaatactctgcgctattttggttaatcgtgcccaatactgccattgcctatactctgtatgtttggttattagggcgcatgagtgtggctgagttttcatttggcaccattgccaacccaatcgcgggaatagtatgtgctgttttgctcataaacgaacaatatcaagactggcaatacctattgatgtttatgatgattgtattttcagtgctacctcagatgctaaagcttaagcagttcaaacaacaaaaaacttaaaagcaaaaaaggctgcccattggcagccttttgcaataatttagctcttcttagctgtgatatttttcacatgcttcaagcgtattttcaattaagcttgcaacagtcatcgggccaacaccacctggtacaggtgtaatgaaatgcgctttttgttcagcaacgtcatattgaacatcaccaacaagctttcctgattcaagacggttaatacccacatcaatcacaatagcgccttctttcacccagtcacccggaataaactcaggtttaccaaccgcaaccactaataaatcagcgcggcgaacatgtgtttctaaatcttgtgtaaacttgtgacataccgttgttgtacagccagcaagtaaaagctcaagcgacataggacgaccaacaatgttagaagcgccaacaacgactgcatgcatccctttatagcgaacacctgtagagtcgagtagggtgatgatcccctttggcgtacaaggacgaagtgccggcatacgctgtgctaaacgaccaatattgtaagggtggaaaccatcaacatctttatgaggagtaatacgctcaagaattttttcagcatcaaggccttgtggtaaaggcagttgcactaagataccgtctacttctttgtcttcattaagttggtcaattaaagcaagtaagtcgtgttctgtggtgtcgccaggtaaatcgtaagacttagatacaaagccgacttcttcacatgctttacgcttagagccaacatagacttggcttgctgggtcttgaccaactaacactactgctagtcctggtgcacgtaaaccgtttgctacacgctctgcaacacgttcagctacattactgcgtacttgtttagctattgctttaccatcgatgatgtttgccgtcatgggtgacctttcattggggttagttaacttgatactgatacatcaaaatatgatcatccaataaagggggcgtggatacacaaaacatgtttgtttgatcatatttattaatgttgtgtattttcgcagaaaagcatcatagcgccaagatgcaattgtatataaagcgatactttataaaaaagagttcaaattttagcttatatttgcaatatttaaccattatgaactaaaagtgaccgattgaattattttcttaaaaaaaagtttgacctaacacggccaaatcactattatgcaccccgttgttaacgaggtcactcgcaaacaacagtaagcatcggcgattagcgcagtttggtagcgcacttggtttgggtccaaggggtcgcaggttcaaatcctgcatcgccgaccacttcttctttaagaagcggtgcttacaggcaaacttttgaagttttcgatgcgcccgtagctcagctggatagagcaacgcccttctaaggcgttggtcgaaggttcgaatccttccgggtgcgccatttgaaaatatgtaaatgccgtggtgattgtagctcagttggtagagccccggattgtgattccggttgtcgtgggttcgagccccatcagtcaccccaatttacttaagatatcggcgattagcgcagtttggtagcgcacttggtttgggtccaaggggtcgcaggttcaaatcctgcatcgccgaccacttttctaaagtggtcttaattttcaaagcttctctcagtatcggcgattagcgcagtttggtagcgcacttggtttgggtccaaggggtcgcaggttcaaatcctgcatcgccgaccacttttaaagatttatggtcaaagaacgattggtttgggtatatccaattcagtcgcaggttcaaatcctgcatcgccgaccacttttaaagatttatggtcaaagaacgattggtttgggtatatccaattcagtctcaggttcaaatcctgcattgccgaccacttcttaatatctaaatacctcctttaaatcagcctaatttaactttgttattttactgcgttcgttttttcagcacttaaacgctgaatgctgctatatacgccaaataattgccccctagactcgactatcataaatattaggttataatgccgcgtctattgtttaacatagtgcccatagaggcaaagcagcaatggtatctcatggttacaatgcgccgttttaagttgaatttttcagcattaaaacttgctatcactcatggagatcaccttgtttgtaaggaaggcgaacagtcgccaaaattgaagattgaggtaaatcatgcaagtttctgttgagacgactcaaggccttgagcgccgtctgaccatcaccgttcctgcagagaacgttgagactgaagttaaaaaacgcttacaacaactgtctaaaacccagcgtatcgatggtttccgcccaggtaaagtacctgcgtctatcatcaacaagcgttacggtgcagcagtgcgtcaagaagttgctggcgaattaatgcaacgcaactacatcgaagcaatcgtttcagaaaaaattaacccagcgggtgctccaactttcgcacctaaagcattagaagctggtaaagatttagaattcgatgcaacgtttgaagtttacccagaagttgaaatccaaggtttagataaaattgctgttgaaaaaccagcagtatctgtaactgacgaagacctagctaacatgctagaaactctacgtaagcaacacgcttcttgggctgaagttgatgcagctgcaggcgagaacgatcgtgtaactatcgacttcgttggttctatcgacggtgaagagtttgaaggcggtaaagctgaagacttcccactagaacttggtcaaggtcgtatgatcccaggttttgaagacaacatcgttggtaaaaaagcgggcgaagaagttgttgctgaagtaactttccctgaagagtaccatgctgaaaaccttaaaggtaaagctgcttctttcgcaatcactgttaagaaagttgaaactcaagagcttcctgagcttaacgatgagttcgcaactaaattcggtgtagctgaaggcggtgttgacgctcttaaagaagaagttaaaaagaacatgacacgtgagcttgaccaagcggttaaagctaacgttaaagaccaagctatcaaaggtcttttagctaacaacgaaatcgaagtgcctaaagcgctagttgatcaagaaattgatgcactacgtcagcaagctgcacaacgttttggtggcgatgctaaaaacatgcctgagcttccagctgaattattccacgagcaagctgtaactcgcgttaagactggcctattactaggtgaagttatcaaggcgaacgagcttaaagttgacgacgctaaagttgaagagttaatcgcaactgtagcttctgcatacgaagatccaactgaagttgtagaatactacaagtcaaatgatcaacttatgcaacaaatgcgtaacgtagcgatggaagagcaagcagttgaagctatcctagctaaagcaaacgtgactgaagttgaaaaagcattcgacgacatcatgaatccacagcaaggtgcttaataagtcattgacttaagctctcgctagcgattaaatggctcgtgttactctgtatatttacagcgtacccgggccattttagtttgtggtagcaagtttcacaaaaaccgacaatactagatgttatttcagaacatttttcagtaaagattgaaatagtgccgaaccgttcacatatatttaaaaagattgaacagttactttaattaacattagtattaatgtgctttccttatagtaaggatgagtcgcagcggataaggaattaaataagaatgaatagcggtatgatagaccctctaaacgcattagtccctatggttgttgagcaaacagcaaaaggggagcgctcatatgatatttactcacgtcttttaaaagagcgcattattttcttaacaggccaagttgaagataacatggcaaacctgattcttgcacaaatgctgtttttagaatcagaaaacccagaaaaagatatttatctatatatcaattcgccaggtggctctgtaactgctggtatggcaatctacgatacaatgaatttcattaaacctgatgtaagcactatttgtgtgggtcaagcagctagtatgggtgcttttttgttatcaggtggcgctaaaggtaagcgtttttgtttacctaactcacgcgtgatgatccaccaaccattaggtggtttccaaggtcaagcatctgacttcgaaattcatgcgcgcgaaatcttatcgattaaagataagttaaaccgtttgatggcagagcacacaggtcaaccattagaggtcgtatcacgcgatactgaccgtgataactttatgaccgcaagcgaagcggttgaatacggcctagttgactctgtattttctagccgcgaaacgaagtaatctgaatagctaataataacgtattgttagctatcaccctttactatgcgaaaactgatattctttgatatagttaaacatagtgaattagcagtagcccagtgctgctgccaacgtaataaatgaggtagctgaatgtctgacactcctacagacggcgacaaaagtaataaattgttatactgctctttttgtggcaaaagccagcatgaagttcgtaaacttattgcaggcccttcagtatacatttgtgatgaatgtgttgagctgtgtaatgatatcatcagggaagaaatcaaagacattgcgccaaagcataatgcgtctgataaattgcctgttccaaaagaaattcgtaatcacttagatgattatgttattggtcaagatcatgcaaaaaaagtgctgtcggtagcggtatacaatcactacaaacgccttcgcaatcaaagtattaatgcagaaattgagctaggtaagagtaacatcctattaattggtcctactggtagtggtaaaacattacttgctgaaaccatggctcgtttgctcgatgtacctttcactatggctgatgcgactacgctaacagaagcaggttatgttggtgaagatgttgaaaacatcattcaaaagctactgcaaaaatgtgactacgacgtagagaaagcgcagcgtggtattgtttacattgatgaaattgacaagatttctcgtaagtctgataacccatcgatcactcgtgacgtatcgggcgaaggtgtgcaacaagcgttacttaaactgattgaaggtacggttgcgtctgtaccaccacaaggtggacgtaagcatccgcagcaagaattcttgcaagttgatacatcgaagattctatttatttgtggcggtgcatttgctggccttgataaagtgatcgaacagcgtagccacaaaaatacaggtattggttttggcgctcaagttaagcaatcggcaagtagccgtagtttaagcgaaacgtttaaagatgtagagccagaagatcttgttaaatacggcttaataccggaatttattggtcgtcttcctgttgtcgctacactgacagaactagatgaagcggcacttattcaaattcttagcgaaccaaagaatgctctaactaagcaattctctgcattatttgcaatggaagatgttgagcttgagttccgtgaagatgcgctcagtgcgattgctcacaaagcaatggagcgtaaaacaggtgcacgtggcttgcgttcaattgttgagggggtgttacttgatactatgtatgagttgccttcaatggatgatgtaagcaaagtggttattgatgaaaccgttattaaaggtgaatcagacccaatcttaatttaccaaagtggtaatcaagataaagctgcatcagaataaagctttaatagattaatatttgatcagttgagtataaaaaaggagccaaaggctcctttttttacaaatatgttgaactttcccttacatatccccatatacttgagtaatctttaaaataaatgaagtgcgaagagaatataatgacgcttgagagaaccgatcgagtcgaaatccccgtgttggcactgcgcgatgttgtggtatacccgcacatggtgatcccgctatttgttggtcgtgaaaaatcaataaaatgcctagaagcggcgatggacaaggacaaacaaattttcctagtggcgcaaaaagacgcctctgttgatgatccgcagcaagacgatatctaccgtgttggcaccattgccacagtacttcagttattaaaactacctgatggcaccgttaaagtgttggttgaaggcactcaacgcgcgaaagtagaaacatttctagacaatgatgatttctttgtagctgaagcgcagtttattgagtcaaaccatattgatgaacaagagcaggatgtcttcatacgcagcgcaattagccaatttgaaggctatgtaaagcttaataagaagattccaccagaagtactcacttctgtatcaggtattgatgaagccgcacgtcttgcagatactatggcagctcatatgccactgaaagtgcctgaaaagcaaaaagtacttgagatagctgatgtcactgagcgtcttgaatacctaatggcgctgatggaaggtgaaattgacttactgcaagttgagaagaaaatccgtactcgcgttaaaaagcagatggaaaaatcgcagcgagagtattacctcaacgagcaaatgaaagcgattcaaaaagagcttggcgaacttgatgatgtacccgatgaattcgaagcaattaaaaaacgcatcgaagagtcaggtatgcctaaagaagcgcaagaaaaagcgaacgcagagttatctaaattaaaaatgatgtcgcctatgtcggctgaagcaaccgtagtgcgctcgtacattgatacgcttatcaatgtgccttggaaaaaacgctctaaggtgaaaaaagacttagctggcgcacaaaagattttagacagcgatcatcatggtctagataaagtaaaagaacgcattattgagtatcttgcggtacaacaacgtactaataaactcaaaggcccaattttatgtttagtcggccctcctggagtgggtaaaacctcattaggtcagtcaattgcacgttctactggtcgtaaatatgttcgtatggcccttggtggcgttcgtgatgaagctgaaattcgtggtcatcgtcgtacttacattggttctatgcctggtaagttaatccagaatatgaccaaagtcggcgtgaaaaacccattattcttattagatgaaatcgataagatgtcttctgatatgcgtggtgacccagcatcagcattacttgaggtgcttgatcctgagcaaaatagtcattttgctgatcattacctagaagttgattacgatttatcagacgtaatgttcgttgcaacatcaaatagcttcaacattccaggcccattactagaccgtatggaggttattcgtctatcgggttacaccgaagacgagaagctgaatattgctaagcagcatttaattccaaagcaagtgaagcgtaatggtctaaaagagggtgaagttgaaatagctgatagtgcaattattggcattattcgctactacactcgcgaagctggtgtgcgtaacctagagcgtgaagtatctaaactttgccgtaaagctgttaagaatatcttgttagataaagacactaaaaaagtgactatcgatgaagataatctagaagagtttttaggtgtacaacgctttgactatggtaaagctgaagatggtgaccgcattggtcaagtaaccggattagcgtggactgaagtaggtggtgatttactgactatcgaatcagctgctgttccaggtaaaggtaaacttactttcaccggttcacttggtgatgtaatgcaagagtcgattcaagcggccatgacggttgttcgtaatcgtgctgaaaaattacgtattaatagcgacttccatgaaaaacgtgatatccatgttcacgtaccagaaggagcaacaccaaaagatggcccaagtgcgggtatcgcaatggtaactggtttagtctcgagcttaacaggtaacccggtacgttctgatgttgctatgacaggtgaaatcaccttacgtggtgaagtgttaccgattggtggcttaaaagaaaagttactagcggctcatcgtggtggtattaaaaccgttattattccaaaaattaacgaacgtgacttaaaagagatcccaaacaatgtattagagggccttgaaattcacccagttacatggattgatgacgttttaaaactggctttaaagcacccagttgagagtttttctgtcgaaactgaaaaaaaccagtaaaaaaccgcaaaaaagtgcatttaggggcttttcaaatactaagggtatgataagttaagcactagttttcaagcctaggccttatgtggcctagggttgagaaaaatataataaactgagcataaatttaatttgcttataaattttcaaaacagtgatgttattttttaaaaaataatcgctcttgataataacaatgaaagaggatgatattgtgaataaatctcaattaatcgatcaaatcgcagctgacgctgacatttctaaagcggctgcaggtcgtgcactagattcattcatcgaggctgtttcaggcgctcttaaagatggcgactcagtggcgcttgttggctttggtactttctcagtacgtgagcgtgcagcacgttcaggtcgtaacccgcaaactggtgagactatccagattgctgcggcaaatatcccttctttcaaagcaggtaaagcgctgaaagacgcagtaaactaatcaataagattagttggtgaggatacctaaggacacttaaatagaatttaggtaacttatcaccagttacttcaagtgaaaaagcgtatctggtaagatacgctttttttacatgagcagggttgatatcaatcagcaatcatccttgattatgctaattggtatattttgtacctgatcagaatagagatagataaatgcttgagaaaatcagagaaggttcgcagggacctgcagccaaaattattttaggcgcggtgattttatcttttgctttagctgggattggtggttatttaggacaaaccacagagcaacccgttgcagaagtaaatggagttaaaattagccaaaccgagttcagccgtgcttaccaaaatgaacgcaatcgtttagagcaacagtttggtgaatactttgcacaaatcgcagctgatccaaattacatggcacaaattcgccaaggcgtgattgaccgcttagtacaacaagaattgcaaactcaactagcggcagagttaggccttcgtgtaagtgatgagagtgttcgtaaagctattttagaaatgccttacttccaagttggcggccaatttagcaacgatcgttacttacaagttattcgtcagatgaacttccagccagacgctttccgagagtacttacgtaaagacatgactcgcagccaacttgttggtgcagttgctggtactgactttattcttgaaaacgaattaaataatactgtagcgcttcaacagcaaactcgtagtattgactatttagttgtgtcaaaagaatcattacaagcgggtattgaagtaacagagcaagaaattgcagattactatgaattaaatcaaccgcaatttttagcgcctgaacaagtatctgtcagctatattgatttaaatgctgcaaacttaacgttggattcaagtgtttcagaagaagatatcaaagcatactacgatcaaaacagcgcacaatatattgagcctgaaaagcgtcgtgtatcacacatcttaattgataacagtgaagacgatgatgcagcaaaagcgaaagctgaagagctattagcacaactgcaaaacggtgctgattttgctgagctagctgaatcatcttcggatgacgttgtgagtgctgaaatgggcggtgatcttgattggatcgaacgtgacatgatggacccagcttttgaagatgcaacgtatgcacttgagaacaaaggtgacatttctgacgttgttgaatcagaattcggctatcacatcatcaagctcacggatattcaaaaacagcaagttaaaccgtatgctgacgtaaaagatgagcttcgtgctgaacttgaacgtactaagaaagtgaatgcgttttatgaaaagcaaactcaaatgggagaaattgcttttgaaatttctgatacattaacagacgctgcagacgcagccggtgttgaagtacagaaaacagaacttgtgacgcgtaactcattaccagagcctttaaataacccgcaagttgttactgcaattttctctcctgaagtgttagaagatcgtatgaactcagaggttattgaagtgggtgatgagcacgctgttgttgttcgtgtaaacgaccataaaccagcaacgactaagccacttgaagatgtatcagagcaaattaaagcaacactggttgcacagaaagcctctgaactagctaaagaaaaagcacgtactttatttgcagatatcgaagcaggtaagagcttaaatgatgttgctactgccgaaggtattgaagtgcgtcaagagtctgcacttgctcgtcaagcgtatactgtgtctccggcaattgtacagcaagtatttaaaatgccgcatcctcaggacacgccagtggtagatgttgttgacctgaataatggtgactctgctatcgttgctttaaaagcagtgaatgaagcacaaagcaccgatattaacgaacaacaaaaacaaaacatcactatggctcaagtgaataaaaactacatggtattcattgctgcacttaaagcgcaagcagatgtaaaagtaccaaaagttgtacaagctgctgaataagtagcaaaacaacttaaataaaaggcgccttatggcgccttttttgttaccgttgaaggtaatcgcactcgcaactacaaggagtatttatggagtatcgcctaatagagcagttaccaagtgcggaagaatactgtgcaatgcgccttaaggccggcttatcagctcgttcattagctgcggcgaaagcagggctgccaaactctctttatgctatttgtgttcgcaaagacgatgagttgattggcatgggccgtgttattggtgatggtggttgtaattttgaagtggttgatattgctgtatcacctgaatatcaagggcaaggggtagggcgtgtcattatgaaacatgtagaccgctacattgaagctgccgcttttgaaggcagctatgtcactatggtcgctgacaaacctggtttttacgaaaagcttggttacaagtttgtcgcaccacaaagccaagggatgtataaaaagttttgagcactatagataaacaaacagcagagcactacaagtggggcaacaactgtgatggatggcacttagtaaagtccaatacattaagtattattcaagagcatgtcccagcaggtgaggctgaagtaaaacactaccataagcatgcagaacaatttttcttcgtacttagtggttgtgccaccattgaacttgatggccaaatacacaaactcactgcgcaacaaggtttgcatgtaagtgctggccgagtacatcagctaagcaatcaaggtactgaaccactgcattttattgttacatctacaccaccaagccatggtgatagaattgatgtgaaaagcagcaaggaaaaagagtaaagttaatagagatatcaacatactcgcgaaggggggcgtttaacgccgaattaaatttaaagttgacggctgacacttcaatgtcagcagttcaacaatttctgtgtcactttagattgtgggtcttggaaaattgcttcggtttggccgtattcaacaatctcgccgtgatcaagtactacgagctggtcgctgatgtggcgcaccagacttagatgatgggttataagcacatagctaagtccagtatctttttgtagacgtagtaataagtttaccgtttgtgcgcgcacagaagggtctagagacgataacgcttcatcaagcactacaaccttgggatctaaaattaaagcccgtgcaagtgctatacgttgcaattggccactactaaacatgtgtgggtaataatgttgatgatctaacagcaagcccacttttgcgagagtttgtttaattttttcttctcgctcatctttattcaaatcagtgttgtactgtaaacaatcgttcagcatgtcgccaatagttaaacccggatttaatgacgcctcagaatcttggaaaatcaagcgaatgtggcggcagtcgttatcacgtatgccatcattttctataatattgccatcgagcaatatctgtcctttatcggcactgtcagcgcccgctaataactttgcaagagtacttttgcccgagccggtttcaccgataatagcaatggtctcaccttggcttaagcaaaacgaaatatcttttaaaacagaaaagcgttttcgagcaaacaaacctgctcgcaagttaaaacttttcgataacgcttgaacttttagcagcggttgcattatttcatcgccttaattaacggaaaatgacaggcataactgtgactatggtgtttagttaattttggtgtaaccacacactctttttgcgcttgcggacagcgcggccctaatcggcagcctattggtaaatgctgcaatgtaggtattgtgcctttaagcgcataaaaaggttctttatgagcaaggccttgttcgtagtcaggtaagctttttaatagcgcttgtgtataggggtgatgtggctggctaaaaatacggttcgtcgggcctgcttcaaccatttgtccgcagtacaaaacatgcataccgtgagaccactcaataatctcttcaagttcgtgtgagatcatcaaaatcgacatattctttagctgattcaagctttttaatagtctaaatacttgcgcacgcgtggtgctctcaagggcggtagttggctcatcggctatcaatagttttggggtacgcgcaatggccatggcaatcatcactttttgacaaataccttcagagagctcatgagggtagctgtcgagtacctttttatgatctttaatacctaccttgtggattaacgcttttactctgtctttacgctgtttattacgttttaagaaaaagccactggttgcttgtgtaggtaaagtttcggcaatttggtcaaatattttagcagttgggtcaaggcagcggcttggatcttggtaaatcattgcaatgtcttgaccaactagtttacggcgctgttcgtttgataaacgcattaagtcaacaccacgccagtgcatgcgatcagccgtaatatgccaacgtttatttaatacgccgacaatagctttagcgatgagacttttacctgaacctgattcaccaactaatgcgtgtacttcaccttcttttaaggtcaaactgaccctatcaaccgcacgaataacggtatctgaggtgcgtaactctatcgttagattgcgaatgtcgagtaattgcatagttagtcggccttacgttctttaagcacttggcgtaacccatcacccactaaattggtagacagtaccgctaaaaataataatacgcccggtaagcctacagtccaaggggcaaggtaaattaaaccaaggttttctgccaaaattgctccccactcagtggtgggtggctgtgcccccagttttaaaaagccaagtgctgagatatccaagatagctgtagagagtgccatggtaaaaataaccacaatgtgttcgtaaatgttcggaaagatcccacgagcaagaatatgccagtttgaagcgccatcaagtttaaacgctgtaatgtagtctttgttgagttcttcaacaatcaaattacgtaccgagtgaatgaactgtggcaataaggctaaaataatcgcccaaacagtattcataaggcctgggcctaaaattgcaataataatgatggccagcaacagcgatggaattgataaggtaatatcgagtaagtggttcaaaaagcttgagcgaataccacggctgatacccgcaaaggtgcccactaacacgccaatcacagtagtaattaaggccgcaacaaccgacaaaccaaaggtgtaggttgcgccattcattagtcgtgataacacatcccggcctaaatcatcggtacctaataaaaagcgcacatcgcctgcgtcatgccatgagggaggcagcaatagggcgtcgctatgttgttgatttacaccatatggcgcaagtaatggtgccgaaatcgccagtagtgcaaaagcaataaacaaccataagccaacaagggctgggtgattatttttgaatttccgccaaaatcgcgctagtggcgatttattcgactcttcagagaataaattaaactttgccatgagcttgattccgcgagagtgggtcgaaaagggtataggttaactcggcaacgatagttgctaaaattacaaacatagacacagccaacaacccaccttgaattgcggggtaatcacgttgataaatgctgtctattaaccaacgaccaatgcccggccatgagaaaataacttcggtgatcattgcaagggtgatcaaagtactaaactgtaaaccgatttgtttgataaccggtaaaagagcattacgaagcgcatggtggaggattaattgtgcacggtttaagccttttgcacgggctgttttaatgtagctttgatctaaaactttaagcatagagtcacgggtaaagcgcaccagtacggtggttgggtacattgcaaggacaattgttggcagtgttagatgatgtagcgcatccaaaaatgccatgccgtgatagggaaagtcagtcgcaataatatcaataagaataaagccagtaaccggctctatttcgtaaagtaagcccatgcgaccagacataggaaaccagcctagttgcagtgaaaaaaccatgatcaacaatagcgctaaccaaaaaacaggcatcgaatagccaataagtgtgccagagttaatcagtttatcaggccaacgcttgtagtaggctgatgctataataccgcttggcacaccaacggccacagatacaaataacgcataaaggcttaattcaagtgtggcaggaaataggtcttttatgtgttggaaaacactctcgccagatgcaaaagagacaccccaatcgccctgaataattcgctctaagaatgcaaaatactgcaccacatagttttcagtaaaatgaaacctttcttcaagcgcattagtttgtgaaaaggtactgtttgtaataccacttaagttagtaagggcatcaccgggaaataaaaaacttaatgaaaacgtaaagatgctcagagtcagcatcataaacattaatagcgctaggcggcgaagaatataatcgagtatcattattctttcctcgcattagccagtgatataccgccaaacgggcttaaattgatacctttcacatcgctacttgcagcttgaaagcgcataccatgggctatcggtaaaataggaagttcttgcacgataatacgctgtgcctgattataaaattgctttcgcttttctaaatcagtggtatcaagcgcttgggtcagtaataaatcgaattcagggttgcaccagttagctgggtttttaccgctaaaggtagcagtacaacttaataatggactcataaagttatctgggtcaggagtgtcggcagcccagcccagtaaaacgctgtcgtggcggtgttcgccaacccgttgtaaaaaagtattccactcgtactcgacgatattaacgttcacaccaattttgcgtaaatcgctttgcattagctctgccattttacgtgcgttgggattataaatacggcttaccggcatggcccaaatattcatatcaaagccatttttatagcctgcttcggcgagtaatgttttggcaagtgcagggttaaattcaggcatggctttttgcgcttcaaatgcccaagaggccggaggcagtaatgactgtgccttaatgccgttgccgtaataaaccgcttgcattattttgtcgatatcgatggcactggccagtgcttgacgaacgcgtacgtcatcaaaaggtggtcgctcagtgttaaaggcccaataaccaatatttaagttttgctctttttgaacagtgatgtcgtctcgctgcgataaaatactcaactgtgcactgtttgggtgcgcagttacatcgcattctttagtgagcattttcgcaacccgtgttgtgccgtttggtgttatgtcatacaccaattgctcaagtactactgggtgtttccaataatcgggatgacgataatagcgaattagacgatcgcgacgatactctttgtacacataaggcccggtacccactggatattggtcaaataagttttcttggtttcgtgctttaagctgcatggcgtattcttcagataacaccacggcaaaatcggttgcaaggtttgctaaaaagctgctttcagcattatagagctcaaagcgtacttgataatcagaaacacggactatgcgacgaattagctgatcaatacccacactttgaaagtaagggtaactggcatcgccaacaaagtgataagggttgtatacgtcaaataggcgactgaaggtaaaaataacgtcgtcagcattaaactcccgagtaggagtgaagtattttgtagtatgaaactttacccctttacgaagtgtaaaggtaatggctttaccatcaggactaattttccaatcacttgccaactcaggctgaaactcagcggtgacaggatcaatactcagcaagcggtcatacaactgattagcgataatatcgatagtcgaacctgtcgttgtaacttgcggattaaacgacacagggtttgcttcagcgcaatagactaagccctggtttttttgttctgtggttttttcttcgctgtctaggcagccgactaagcacaccaaagacaaagcaagtaacggtttaaacacctgattagcctctaactattgctgctgatctaataaattgtattttttcaaatagccacgtaattgatgatacgttaattctaagtgttctgcagttttcttttgattaaattggctatgttcgagtgcttttttgatcacatctatctcaaagtcatttgatagctgttttaaattacaaggaaattgaatttcaggtttattcagtgtaaccgtttcttgattttgaactgtagcaataggggcagcatgttcgacactagcaactggagcacttgcaaccgcagctttaacccgttgtttaggtctaaatttactcgcgaatgggtctaaaataatctggtgaacgggaatatgttcattaccatggcgatataagctacgttcaaccacattcttcaactcacggatattaccgggccactcataagattgcagtgtttcgatggcgctacgagtaaagccactgaatagctcccattcaaggtcgcgagccatattaattgcaaattgttctgccaatagcatgatatcttcttggcgttcacgaagtggaggtaaggtaataacatcaaaggcaagacggtcaagtaagtcgcttctaaattcgccttgttcagcaagcgtaggtaagtcttcattggtggcacacactaaacgagtatctactttaaccgtttgcttaccaccaacgcgttcaaattcgccatattcaataacgcgtagaagtttttcttgcaccattgcagaggtattggctaattcatcaaggaatagcgtaccgccgttagcacgttcaaagcggccttcgtgacgtttgctagcacctgtaaatgcgccgctttcatgaccaaataattcgctttcgagtaggttttcgttaagcgctgcacagttaagctttatatagttttgatcccaacgcttagataaaaagtgcaaacgggcagctataagttctttacccgtaccgcgctcaccaataataaggacaggcttttctaaacttgctagttgtgaaacttgatcaagcacacttaaaaaactgtcagattggccgagtaagttatcctgttggcgaaattggctcatattccctaactcttagtcatttttactaagatctagtgtatttcattatctttgagaactaaagaaatttataaatttagtttaactatttgaatttatttggttattctaggtttataaaagttggcaagcatattgatactagatataccaactgattaagttaaaacaccaaagaggtaaatgttatgggaattttttcacgttttgcagacatcgttaattctaatatcaatgccatcttagataaagcagaagacccagaaaaaatggttcgcctgatcatccaagagatggaagatacattagtagaagttcgctctacatcagcaaaaacacttgctgagaaaaaagagctagtacgtcgcgttgacacgttaaaagttcaagttgcagattggcaagaaaaagctgaattagcactcagtaaagaccgtgatgatttagcacgtgcagcactgattgaaaagcaaaagtcagcagatgcagtcgcagcagttgaaactgagcttgaacatgtagagtctcacatcgagaaactacagcaagaagtaagcacgttacaagagaagctagctgatgcaaaagcgcgtcaaaaagcaatcatcttacgccaacgctctgctgagtctcgtcttgaagttaaaaaagcactcgacagctcaaaagtcgaagacgctttaaaccgcttcgaacgttacgaaaacaagatcgatggtctagaatcacaaatagagtcttatgatcttggtaaaaaatcattagctgacgaaattgctggtcttcagcaagacgaaaagattgatgatgagctagctgagcttaagaaaaaactagcagataaaaaataataaatgggggcgtgtcccccaatgcttaaacacatgacggattgacaggagagtagcatgtttgatgcagaagttttgatggcacccattatcgtttttatggtggttgttgccccactttggttaattttacattaccgtagtaaaaagcaagttagccaaggtttaagtgaacatgagcaccgccaattgttagagcttgcacaaaaagcagacaaaatggcagagcgtgttgaaaccttagaagccttattagaccaagaggctccacagtggagacgtaaagtatgagtaccaaacgcgaattatttagagaccctgagcgtggcaaaatagcaggtgtatgcgcaggtatcagcgattactttaacatggagctttggctggtacgtattttagtggtgacagcagtgctattatcaggcggcccgtttattgttgttgcttatatcgcagcgtggtttattttagataaaaaaccaactgaaaaaacagtgaaaagcgcagatagcattcaccaagacccgcttgaagtaaaatttaaagtatggcaaaaaggggaaccacctcgccgtgcattgcaagacttaaaagatcgtcttgctcgagttgatggtcgtttacaagagatggaacgctatgtcacatcaacagaatttacggttagccgtgaaatcaacaaactttaaaggatataaacgcaccttgtttgcatcgtgataccaagcgcaaataaggtgccagacactttatgagccaatcatttgcaaagaacacctttaattcgttaaaaaataaagcggaaaaagcccttcatcgtagtttagaccaacacgtgaagttagccgtcacggggttaagtggcagtggcaaaaccgcgtttattaccgccttagttaaacacctaacaagtcaagctgacgaaaaaaacttacctttttttgatgtgatgcgcgaaaagcgtcatatcgctacaaaaattgtgccgcagcaagcactgacaatacccacatttgaatataacaatgcattatcggcgttgttacctgttgaaggtgagccaacatggcctgcctctaccgagcgtatcaatacgctacgtttggcaattaagtaccaaagtaactcggggctgcgtggtcacttcgcaccgcaatcaacactttatttagacattattgattacccaggtgaatggctacttgatttaccaatgctagagcaatcatttgctgattggtgtgaatcacaatactcactgttgcagcaaacagcccgtaacgaaaaggctaagccatttttaacagcccttgctgaacttgatttatcagccagtgttgatgaaagtaaacttgctgatgttgctgcgctctatcagcagctattgctcgaccttaaaaaagacaccaaacttgccatgttacaacctggtcgcatgctgatgcccggtgagctaaaaggcgcgccgttattacagttttttccggttgcgaatgtgcctgacgatgtaaccgaagggtcaaatctagcgcatcttaaaaagcgctataaggcctatgtaaaagaggttgtaaaacctttttacgagcagcattttcgtcattttgaccgacaaattgtgctggtggatgtgctcagtgccttgaatgaaggtagcgaaacgctgcatgagcaaagtcgtgttattaaccagttgctggcgcactttaattatggtgaagcaagcttctttaaacgtttgtttaaaccaaacatcgacaagctactgtttgcggccaataagtcagatcatattagtgctcagtatcacaaagatttagcgctattgcttgattcaatcgtgcatgaccaaacgaatcacttaaagttcgaaggcgtgcaaatcgaaaccatggcaatgtcatctatctgcgctacagagccgcgccaagtggctgaaaaaggccagcagttagcctgtatttatggcaaacctttgggcgagcaagaatggctaacgtatttaccgccgcagccaccatcacgccttctcaacaaacaagagtggccaaaacaaggctttgagttcttatcgttttcgccactgccatgccctgataaacggttaaagcatattcgtttagatcatgtcatgcagtacctgataggagacaaactaacatgagtgagcaaccaaaggagatgaactttcaggctggtcgccgtatttcaagctctgcaagtaatgaggctacagcagaggagttaactgttgctaaagtgatagaaaacgccgaatttatcgatactgaagaagatcagcaagatagcattgagcttgagcctgtgtataaaaagtcgaaatggcaaaccctaaaaggggtgtttatttttagctttttagcgttagtgttacttgaatttgcgatgtcattgtttgtgacgtttcagcaatcaattattttaggctcggtgtatttaacggcagttcttagtggtgtactactaattgctcgtgttatttggcgcgagtaccgcatgctaagaagtttaaagcgtaatcaattgcatcgtaccgaggccgaccgtttactcaatagcgagcaagtaggtgaagcactgccgtggctagaaaagcttaataaacatcaggagcttacagggtttgaagagtttaagcagcaaatagcgagtcaccataccgataaagaaatcatgaccttatacgccgatagtttattggtaagccaagatcagcaagcgaaaaaactgattaaccgttttgccactgagtctggcttattggtggcgctaagcccgctggctttagtcgatatgatggccgtgctatggcgtggcactaagctcattgagcaaattggccgtatttacggtattggttttggttatgcaagccgtattaaattgtatcgcttattagtgaaacaggtgctgtttgttggtagtgcagagttagtctcagatttagcagcgacggcactaagcgctgaattactggggaaattgtcgggccgtgcagcgcaagggctaagtgcaggtatttttactgcgcgtatagggtataaagcgatggaacttagccgcccgttacctcgtttagagcataagcgcagtttgctgaaagaaaccgccaatagtattgcccgtaaaattgcctcacgcacgggtgacaaagagaccgaaaatacaaaatgacaacttttgtgtacagttaataaaaacagctgagtgatatttagccatctgagcatccggcatgcttgtgcattgtgggtatctacgttttatttatgagtatgaagtactgataataaaaacgagaacacacaatgactaagcatcacttacatacacaatgtattcatggtccagaaaaaccaaacgatcctcacggcgcactgagtgcgccactttaccaaacctctaccttctcctttgctaatgccgcccaaggtgcagctcgatttgccggtgaagagcagggctttatttatacccgtttaggtaacccaacaacgcaagagctagaacaaaaagtggctcagttagaaaactgtgaagcagcggctgccacagcgaccggtatgggagccgtgtctgcgtctgtgcttagctttttacaacaaggtgaccacctagtcgcatcaagtgcgttatacggttgtacttttgcattttttgctcacatgttgccgcgctttggtatcgaagtcactttcgttgatatgaccaatgaagctgaacttcgcggtgcggttaaagccaattcaaaaatgatttttgcagaaacgccaattaatccgaccatggcggtgcttgatctaagtttaattgctgatgttgccaagcagcatcaattgataagcgttatcgacaataccttcttaacgcctctgctacagcaaccgacctcgtttggtattgatattgtggtgcatagcgcaactaaatacctaaatggccatggtgatgtggtagctgggcttgtgtgtggcacagaggagcatatcaacctaatcaaaatgacggtgctaaaagatattggtgcaacgattagccctcatgatgcatggttaattaatcgcggtttaaaaacccttgctgtgcgcatggagcgtcactgtgcgagtgcccaaatagttgctgaatatttagagcaacacccgctagtaagccaagtttattatccaggacttaaatcacatccgggtcataaatttattggctcgcagatgaaagcggctggaggtgttattgcctttgaaattaaaggcagcctagaagatggcgaaacattcataaataacacccagctttgcactctggcggtcagtttaggggatgctgaaaccctcattcaacatcctgcatcgatgacacattcgccttatacaccagaagaaagagcagcagctgggataagtgatggtctaattcgactatcagttggtctagaggatgttaacgacattattaacgatcttaaaactgcatttacattcattggttagcttgtaattttaagtttacggttttgcttgccttaatacctttaaaaacggggtgtgtaaacttttagatcctttggtgtaatttaatctttacgttagggctgtttctgcaaaccttagaaacagccaaaactattaaaatttagcttacttttacatagtatcgtcttaacaagttaatgagattctgatcaatgctgatcaagatttaacgaagaaggttattatggctaaagcaagtaattacacctccaagcaacctgatgaaaatggggttatccattggagcgaagaagaaaataaaatatggtctgagctagttgctcgccaactcgcttgcatagaaggtaaagcctgtgatgaatatttagcaggtcttaagaaaattaatttaccaacagatcgtattccacaacttagtgaactcaacgcagtgctactcgaaacaacgggctggcaagtcgcgcctgttccagcactgattgattttgatgagttctttcgattattagcaaacaagcagttccctgttgcgacctttattcgcagtcgtgaagagtttgactatttacaagagccagatatcttccacgagatttttggccattgtgccatgcttaccaacccagcatttgctgagtttacgcacaaatatggtcagttaggttatgccgctgaaaagaaagatcgtgtttatttagcgcgcctgtactggtttactgtagagtttggtttaatgcaaaccgaacagggtctgcgaatttatggtggtggtattttatcaagcccaggcgaaacacaatacgtgtactcagataagcctgaaatcaatgcgatgaatgtgctagatgtattacgtacaccttatcgtattgatattatgcagcctgtgtactacaccataaactcaatcaatgacttatttgatatttcacaaatggatatcatgtcgctggtgagtaaagcaaaagaattagggctacatgagccaaagtttcctcctaaagaaaaattagcaagttaaggatttataatgtcttcattaagcacacaaaagtgtgaagcgtgtcgtgcggatgcgcctaaagtatctgatgctgaattagcagaattgatcaaaatgatcccagactgggttcctgaagtgcgcgacggcattatgcaattagagcgtgtttacaagtttaaaaacttcaaacaagcacttgagttcactaataaagtgggcgatatggctgaagaagaaggtcaccacccaggtctgttaaccgagtggggcaaagtaactgttacttggtggagccactctatcaaagggttacacaaaaatgattttatctgtgctgctaaaacagacgatgtattcgctgcactataatttttaagttctgcccagaacgataaaaggcgtaacctcaggttgcgcctttttgcttttttagagcccaagaattaacattaggcacttatctatgcaagaacactagaaaagtaaagaatgaaaaacaaagcgcttattctgccattcctactcattttactgcccttaattgatagtttgtttatcccgcaaacatttggcattcaatggcgcagccctaagctgatgtatcaagcaggcgtggcgctgatgattataaagctcactatggttgccattgggctttggttattactcaaagcaaagcgcctttatatggaagccagtaaatcgacccgtattctcaaattttcagtatttttactcggcggcttacaagtggtgataatgacagcaatatgcttttggtatttagtagcgggcacgcaagcgaaacactttatgctgcaagacaacattgctgtatttaccgctgattatagcgtatttgccccggtacatcatgagttttcatttatatgctttgatgccaatggtttttaccacctgcaaccaattgcccagctaccttggctcggaacctttacgtttactagccaagattcacgtttaatcattcaacataaaaaccaaagcggcgcgaatactcaagaaatttcattaaaaggggttggttgtttgcaataaagtgaagaggtgttggtattcatctttgaaatagttataactgccagctcacgacatattcatttgctggcagtctattacttacatagctaactagttattgctttacctgaacttcgacttcttgcccggtttgtagttgctcggcgccgcgtactgccactttatcgcccgcatttaaagcgatgtttgaagtcggggtgacttcaaccagtttatctttgccattaccgacttttacgggaatttgcagggctttgttgtcgttgtcgattttgacgatatgggtgccttttttgcgtaagatcagtgcatcgcgattcaccagtagtacatcccctttgctttttagtggcacggctacatcaacaagttggccaattgcccatgtttgctcggcatcatttgctagtaaggcacgtacttctacggtttgtgaacgcggatcggttgatgggatcaccgctgttacagtggctgttgtcatatcaggggctgataagtcgccggcttgaatcggtaactctatgcctttgtgcaaaaactttaagtatttaacaggcacgtacaaacgcacttctaagttattaatatcgagcagggtgaccagttcatcagcacgatttatttcgcgaccagcgcgtttaaaacgctcgctgatcacgccatcaaatggggcgcgaacggttgcacgcgaaagctgatcgtctattacttttaattcaaccttagccagtgagatatcagataacgcaaggtcatgcttattttgcatatcatcgacttggcttgctgcggcactgctggctttggcgagtttttgtaaacgagcaagttcttgttgatataaacgtaagtttattttggcgcggttgagcatttcttgctggcgtgctttttcaagttctagcggcaaagtatccatacgtactagggtatcgccacttttaaccagagtacctggctcaacaacatataataaacggccgctaacgcctgctgttaggattacatcatctttgccatacaaagtgccgctgacttcaatttcgcttgtcagtggagcttgtgtgacggtttctactgtaactggtacgactgcaaaggcgttaaatgcgataagacttaatagcgcacaaaagcgagcggttaatttacgaaaaggtgtgttcattgttttaatactcattgattcgataccaagcttaaaggcgttttttctggttgctgtttgttattagcgggcggcagttgtctgccaagttgcaataaacttggcattaatatcagggtgaatagggcgctaatagccatgccgccgacaatcacagtggcaagaccacggtaaatttctgatcctacccccggcattagcatcagtggcagcatgccaaataagctggttaaggtacttaagtaaacgggtcttgcgcgcagtagtactgcttggcgaacagcgtcttctcggctgagcccagcagccatcgcaacacgggtttggtcaaccaataaaatggcattatttaccaccagacccagcaagataataaagccaatcatggtcagtaagtcgagcgattggaaggtaaataagttaagcacaaatagggctagtacaccgcctgcaattgccaatggcatgacgagtaaaactaacgcgctgtctttggctgacttaaacaatgcggtcattagcaagaataaaataaacagagccaagataaagttgattgtcatttcttgcatggccgaattcatcttttgtgcgttacccgccaaaatcgcgccagagctgtcgggtaagcttgcacgaacttttggcataacttgctctgagagaatggtttgcgcttgttgcaagctcatgtctgctggtggcgtgacaacaatacttacggtacggcggccattaacacgtctaagctgggttggccctacggtgcgttcaatattggcaagctcgcctaaggtttgaatacctgattgtggggtcacaatgggaagggctttaagctcctctggggtttgccacggaataccgcgcaaaatcacgttcatgcgttcgttgccatcaaagtattcattaacaaataacccacctgtataggcttgcactgcttgagatacatcacggcgagttagccctgcttgggttatacgacggtcgttgggtgtgagcctaagttctggctctgccatatcgagtcgtggttgtggccttgctgtagcatttggcattgcttctgtaactgcttgcagcgcaacattagcaccggctattagctcgtccatattcgggccagttaaatctatattgatattgcgaccatcaccgccattagcaacttggatcatcgaccctctgaagaagaatacttgggtgtcgggtaaatcaatgaagatctcttctcgggctaccttcattaattcttcaacacgttgtggatcagcagaatatataaagccgccagcatttgcgccaaacgcataaaagttaaaatcttttatccccggctctttttcacctgtgtaataaggcattaagcgctttttaatacgcatcagcagctcttcttccataaactgtacattgccgccaggtggggtatttaagttaaagaaaaagccatcggttggtgctcgcggcataaaatcagttttcgggagcatggtcatggtggcgacgagtgagccacccaataacgacactatccatactatttgtttaatccgggtattggtaagcgccataataaagttagtcagcttatgccaatattcacggtaaggatccgcttttagctgtttgtctggccaaaagtggttagccaacggaattagtgtaattgcgcaaatcatcgaggcaataacagcaatagataaggtgagcgccaagtcagagaataactgcccctcaatacctgccataaataaaattggcaagaagatagcaacgctggtggtggttgaagcaaataaagcgccagttacttgggctgcgccttttagcgcggcttttttactatcaaagccttcgcttctgagccttgcgatgttttcttgcactatgatggcggcatcaagtactaagccaacggcaaaggcaaggcccgccaatgaaataacatttaagctacggtcaaaaatattcaatgttaaaaacgccactaacaaagagacaggaattgtcgctgcaatcacaaatgtggcctttaagcctctaaagaacagccataagattaaacacgacagcagaacacccaagcctaagttactttttaccaacgataaggcattacgaatatgcacagaggcatcaaaacttaattcaatcgctaagccattttcagccagtggcccttcgtttagttctttaatagcaaggtttatttcgtcgagtagggcaacggtattggcttcgttggcgcgcgaaatacgaatgtaatacgcgggtttaccatttcgaccactcatgcccaaacggtcagaaaaagtgcgctctacacttgcgatatcgccaaggtaaataggtctatcgcctgaataaccaacgcgcatttgtgccatgctcgataaatcatattgcccagtaaagcgtacggtatattgacgacggccaacattggcaagaccaccggaagtatcgcgtgagctggctaatacattactgatttggtcaaggctgacgccaagtgcagcggctttgtgagggtcaaaggtgatacgtaattcttttggtcgttcactggctaaatcaacgcgagcaacaccaggaatacgtgccaaacggggctcaacaaattcatcgatttgtttttggaactgcgccatgtctaaatcaaggctgtcgctattaaaatctttcggtgtgactaataaagttgctgcggcttcaccattattaccgccagcaaataccacaggatcaaatgcatctaacggcaggggcggcgcttggttaaggctagttaatacatcaagcatcgcctgttgcatgttttgcccaacagcaaaagttaacgtgatagagccattgccacgattaatgtaagtattaacctctagcgcacccggggtgttttttaccgcgttctcgagcggttcaatgatcactgattcaatctcttcaggtgcagcttggcgccagccagagaaaatagtgatctgcggttgctcaatatctggtgtgagctgaattggcaacttaaaaatacttaacatgccaaacaacataatcaacaccaagatgacaataacactcgcagggttcttcagcgaactacgtgtcaggttcattgtgtgtgttccaaaatcagtttgtgtgcattgtagtgcgatgtaaaaaaagtgccagtgaggtaaatgaaatgtatgtcaggagtaacgctgaatagccgtaattaagcgataaaatgtgtatttgaaataagatgtaacaatttaacagggagctttaagtcttaagcgctcagttttaagtaaaaaagcgcgaaactaattagtatcgcgcttcttgaatttttaaacttacagctcagttttgttattcatcaatcgagcgaagtagggcattaatacctactttttcgcgagtttgctggtcaacttttttcacgatgatagcagcgtataggctgtgcgaaccatcttttgacggtaaagaacctggaacaacaactgcaccggctggtactcgtccgtaatgagtttcgcctgtttcacggtcatagatgcgcgtgctttggctgatgtaaacacccattgaaataaccgcaccttcttctaccacaacgccttcaacaatttcagagcgtgcaccgataaaacagttatcttcgataatcgttgggtttgcttgcagtggctcaagtacaccaccaatgcctacaccgcccgacaagtgaacgtttttaccaatttgtgcacacgagccaaccgttgcccatgtatcaaccatcgtaccttcatcaacgtaggcaccaatgttgacataagatggcatcagtaccacgtttttacctacaaagctgcctttgcgcgcaactgcattaggcacaacacgcataccgccttgttggaattgctctggtgtgtagtcgctaaatttaagtggtactttgtcgtaaaactgattaacaccatcgctcataggttggttatcacgaatacggaaagacagtagcaccgcttttttcaaccattgatgtacaacccactcaccactgattttttcagcaacacgggcagcgccgctatcaagtaattcaagcgcatcgataatggcttgctttacttcacttgataccgtgcttgggctgatgctatcgcggttgtcccaggcgttttcgatcatggtttttaaatctgacataagatcctcttattcggtttctgcgttgagttttttacgcaatgcttgatgaattttagcctgttcttcgtctgttaatgcttggtactcgttatttgataccacgaagaaatcttctgcacgttcaccaacagtggtaatccgcgcggcatgaatatgtaataagtgtgcttgaaatacttcagcaattttcgttaatagacccggaatatccaccgcttggatttcaattaagctgcgatctttacgagcatgcggtctaagcacaatttttggtttgatattaaagtctttaaagcgctgtgagcggttctttttgatgcgaattttctttttcggatcgctaatcgcaagctctaatgcacgcttaatgccttgcgcacggctacttgcaatcgggtcaccattaacttctaaaataacaaagctaaaaatcacatagccatctttagtcgttaacacctgggcatgttggatttgcgcttttttcgaaccaattacactcaccaagcgtgcaaataaaccccctgagtatgggctgtaagcgaatacttgcgtccccccgtgcattgcggtgtcagaaacagtgacacttggtaggcttaaatcttcacaatttaataagtgctctgtttgccacgaaatttgttgctcactaaaggcggtaaaataattcgctttaaagcggctccaaattaagtcgatttggtcttcattgcagccgtgattcaataagcgctgcttggcttgctgttttttatcacgaatctggtcgcgctgatccattgggttttcaagacctaaacgcagtgctcgctgggtatgtaaatacagctcacgtagtagggtgtttttccaatcgttccatagattatcgttagtggcacgaatatcggccaaggttaagcaatataaataatctagctggcgctcattttttactttgcttgcaaagtctttaattacgtctgggtcattaatatctttacgctgtgcagtgaccgacataagtaagtgattagccactaaccatgaaataagcttgccgtctgatgatgggaaacggtgcaatttagcaaacgcaatcgcatcaaccgagcctagttcagagtggtcgccgccacggcctttggcgatatcatggaatatacccgctaaataaagtaactcaggtttgtccatgcgggtgacgatttcactacaaagtggaaactcgctgacttttgacttatcaaaatatttataaatattgttgattagtttgtgggtgtgctcatctacggtataggcgtggaataaatcaaattgcatttgcccaaagatattacgccactgcggtaaataggccgcgataatgccgtgcttgtgcattaaggtaaatgcgcgacccataccatttgggtgtttaattaagcgtaaaaatgcttcacggcaagcggcgtaatcttgtaaatcaccgagtaaccggcgacgtacttgacgcattgtgcgtatagtacttgggtagatatgggtaatttcagggttatcagcaatatgctcgaacaacacaaatagctgatctcggcggaaaaataccgacgggttttttacgcgaatttgatggccaatacgttcaaagttacggtcaagctcaaccactggtaactcaccggcacccggtaaaatactttgctcgaagtatgaaagtagcatttggttgagttcacgcacgcggctcataatacggaataagcgcttcatcatgcgctcaactgaggccttaccttcactaccaaagccaagaatttctgctgcgtgaggttggtggtcgaacagtaaacggttttcagatcgccccgcagcgatgtgcagcgcaaaacgaatgttccaaaggttttctaaacattcagaaagctcttggtattcttcgtgagtaagatagccgtgatttattagttcttgtaatgtttcggctctaaagtgctttttagctacccaaataatggtctgtaaatcgcgcaggccaccagggttttctttgatgtttggttcaagattataagccgtaccatgacattttttatggcgtaaactttgttcttgtacttttgccaaaaagaattcgtctgatcgccaaattggtgtatcaatcaaatgatttttgagtttttcaaattcaatgtgattaccaaaaattaatcggctttcgagcaagctggtggcaaatgtcacatcttcgcgtttttgttctaatgcttgttctattgtacgaacgctgtgaccaatttctaaattaagatcccaaagcatggtgacgaactggccgattttctcgcatacggcttcgcttggctgttcactaaccagcagcataaagtcgatatcggagtagggatgtagttcgccacgaccatatccacccacagcgataagtgctaagtcactttcgtgagcaaggtcgtaatcatgaaacagtttaattaataagcggtcgataaactcagcacgggcattaattaagttgctaacgggttgttttgagaattcgttctgtagccatttataaaaataactagaacagtcgcgataatcgctaagttgctcagcttggctgagcaacttttttactttattgggtaatgccacaggggctggctcctagtgttcgatgatcctgtcgatagtatcatctgatcggagcgttaaaatttcaacaccattttcagtcactagtagtgtgtgttcccactgcgcagacaaagaacggtcttttgttacaactgtccagttgtcttttagtaatttacactgacgtttaccggcattgaccattggctcgattgttaagcacataccagctttcaatacttcgccagtacctgcttttccatagtgcattacttgtggctcttcgtggaactcagcaccaataccgtgaccacagtattcgcgaacaattgaatagttaaagctttcagcgtacttttgaattgcagcaccgatatcacctaagcgcacgccaggtttaaccattttaatagcaaggtataggctttcttgcgtgatatccgcaaggcgcttaccttgaatattaggtgtacctacatggaacatcttagaagtatcaccgtgataaccatctttgatcacagtaacgtcaatatttacgctatcaccttctttgagcggtttgtcattcggaataccgtgacaaattacatggttcactgaggtgcaaattgattttgggaaaccgtgataattaagcggtgctggaatagcatcttgaacattaacaatataatcatgacaaattgtatttagttcatctgtggttacacctggcaccacatgcggttctatcatttcaagtacctcggcggctaagcgcccggcaacacgcattttttcgatttcttcaggggtcttgatcacagcactcattgaggctccaaagttgtttttcaggtcagtttttagtgcacaaattttgcactagacgttgagttttcaattttaatatggtataaagcgcgccgtctttttacaaataaattcttaactgattttttgtatttaagacaaacacaattttattttaacacacacacgtatcgtcacatacacttgggtgcacttaagttacaaattaactacggtgttggtgctatgggatatgtggaggcctaaccctaaattatagaggattataaaatggcaaacgtttcaatgcgcgatatgcttcaagctggtgttcactttggtcaccaggcacgttactggaaccctaagatgaagcctttcatcttcggcgctcgtaaccgtgttcatatcatcaacctagagcaaactgtaccaatgttcaacgaagcacttaagttcttatcgaacgcagcttctaacaaaggtaaagtacttttcgttggtactaagcgcgcagcaagcgaagcagttaaagaagcagctattcaaagcgagcagttctacgtaaaccaccgttggttaggtggtatgttgactaactggaaaacagttcgtcaatcaatcaagcgtcttaaagaccttgaagcgcagagccaagacggtactttcgagaagttaactaagaaagaagcgttaatgcttactcgtgaaatggaaaagcttgaaaagagccttggtggtatcaaagatatgggcggtcttcctgacgcacttttcgttatcgatgcagaccacgagcacatcgctatccgtgaagctaacaacctaggtattccagttgttgctatcgttgatactaactctaacccagacggtgttgattacatcgtacctggtaacgacgatgcgatccgtgctattcaactttacactggcgctgtatcagctgcgatcactgaaggtcgtgagaacaacatcgttgctcaagctgaaaaagacgacttcgtagaagctgaataattagctgtcatcaagtcttcatctaatcaaggtgaagacttgttattcttgtcaagcggcccataccgcttccctataacagaattcaattgaggatattctaatggctgtaactgctgccctagttaaagaattacgcgagcgtactggcgctggcatgatggattgtaaaaaagcgttaactgaaactaacggtgacatcgagttagcgattgaaaacatgcgtaagagcggtgctgcaaaggctgctaaaaaagcaggtaacatcgctgctgaaggtacaatcttaatcaaagaaggtaacggtttcgctgcgcttcttgaagttaactgtcaaactgacttcgttgctaaagattcaaacttccttggcttcgctaatgaagtattagacgctgctgcagaatctaaagcagacatcgatgcacttaaagcacagttcgaagaaacgcgtgttgcactagttgctaaaatcggtgaaaacatcaatgttcgtcgcgttgagtacatcgacggtgacaaactttcttcttaccgccacggcgaccgcatcggtgttgttgtagttggtgaagctgacgaagaaacacttaagcaagttgctatgcacgtagctgcgtctaagcctgagttcgtaaacccagaagacgtaccagctgacgttgttgaaaaagaaaaagcagttcaaatcgacatcgcgatgaacgaaggcaagcctgctgaaatcgctgagaaaatggttgttggtcgtatgaagaaattcactggtgagatctctcttactggtcaagctttcatcatggaacctaagaaaactgttggcgaaattcttaaagagaaaggcgcaactgttactaacttcatccgtttagaagttggtgaaggtatcgagcgtaaagaagaagacttcgctgctgaagtagctgctcaaatcgctgctgcaaaaggcgagtaattttctaacttagtgacgtaggacaattagatgaaattaatctgttattagcttttgcgtcactgatgaaaattctttaaaataaccgcgttttatgtgtaaccatagcgcggttattttttatctcattattaaggctggcccaaatattatgactatcaatcgtaaacctatttttagacgtgttcttcttaaacttagcggtgaagcattaatgggagacgaaggcttcggcatcgacccgaaagtacttgaccgtatggctcaagaaattaaagaacttgtagagctcgacgtagaagtaggtttagttatcggtggcggtaacttcttgcgtggtggttcattagcagaagcaggtatgaaccgcgtagtgggcgaccacatgggtatgcttgctacggtaatgaatggtttggcaatgcgtgatgctttgcatcgtgcatttgtaaattgtcgcttaatgtctgccattccattaaatggtgtgtgtgatgcttacaactgggcagaagctatcagcttattaaagtctggtcgtgttgttatcttttctgcaggcacaggtaacccattctttaccactgattctgcagcgtgtttacgcggtattgaaattgaagctgataccgtaattaaagcgacaaaagttgatggtgtttattcagatgacccagtgaaaaacccagacgcgacattatatcgccacttaagctacaatgagatcattgataaagaactaaaggttatggacttagcggcattcacgcttgcccgtgatcataatatgcctttaagtgtatttaacatgaataaatcaggcgcgcttaagcgtgtaattatgggcgaagatgaaggaacgcttatctcttcacaagcctcggatgaaattaataaatagattaggattgaaccgtgattaacgatatcaaaaaagatgcgtcagaacgtatgcaaaaaagtgttgcggcactaggcagtcaattatctaaaattcgcacaggccgtgctcaccctgcattacttgacggtattcaagtgtcttactacggtgctgacacgccactaaaccaagtagctaatgtaacaattgaagactcgcgtacacttgcaatcagcgtgttcgacaagtcattagcgcaagcggtagaaaaagcaataatggcatcagatttaggtttaaaccctatgtctgctggtactgtgatccgtgttccacttcctccacttacagaagagcgtcgtaaagaccttatcaaaattgtacgtggtgaagttgaaggcggccgtgttgctgttcgtaacattcgtcgtgacgcaaatggcgacattaagagcttattgaaagacaaagaaatttctgaagatgaagcgcgtcaagcagaagacgaaatccaaaagcttacagataagttcatcaaagagatggatacacaattaacagcgaaagaagctgaattgatggaaatctaaaagctcttgtttttcttttcgggatgaatcctgaaaggcaagcaggtcattgcaaatttattagttttgaaacgccggctggggtatactagacggcgtttttttatggaatactcgatatttatggttcttaacgctgataaaatttcccagcaaagtttgcctaagcatgtcgctataatcatggatggtaacggtcgttgggctcaagcgaaaaatcgcccacgtgtttatgggcataaaaaaggcgttgatgcggttcgtcaatcagtgcaattttgtactcgcttaggtatacagtcgttaacactattcgcatttagtagcgaaaattggcgacgcccagaggacgaagtaaatacgctcatggagctatttttattcgtgttgggcaaagaagttaaaaagcttcataaaaataatgtaaagctcaatataattggtgatttatcacgcttttctgagaatttgcgtaataaagttgatgcagcacacgagttaacccgtaataatacgggcttgcaattaaacgttgctgctaattatggtggccgttgggatattaccaatgccgcaaccatgcttgcaaaaaaagtcgcagccggtgaaatggccgctgaagagattaccgaagagcttatgagtgaacacatgagcatggcagatcaagttgagcttgatttaatgatccgcacaggtggtgatttgcgcattagtaactttcttttatggcaagcagcttacgctgagctttactttaccgatacgctttggccagactttaatgaagctgcttttgccgatgctatcgcatgttacgttgccagagagcgacgatttggttgtacaggcgaacaaataaaacaattactcgccgagacctaattactagttgaaggtacacacattgctaaaacaacgaattttaacctcgctcgtgttggcaccacttgcacttgtattggtattttataccccattaactctatttagttatatcgccgccggtatcgtattactcggtgcatgggaatggtctgcgtttatggggctatgcgataaagttaaacgttttggatttgtcgctgcaacagcggtgtttcttgcattattaaattggcattggccgattgactcgctttggcaaaatggtcaactagtaggtgatgcaaactatctattcacgctatcgtttgcttggtggattgtagctacttacttagtttggcgttatcccgctatggcaaaagcgtggaatgaaggcattgtgatgcgtgccattgccggatttttaacactcgtaccactttggttagctttaaataccctgcgtagcgcaggctatggcgaatcaacccatttcggctctatgcttattcttgtggttttaggcattgtttggagcgcagacatcggtgcatattttactggtaaaaacttaggcaaacacaaactaatgccaaaagtgagcccaaataagaccattgaaggcctacttggtggcgtggtggcctcagttatttttgttttagtattttgtcattacagcaatgttgatatggctgtgtggccaatttatgcggttatgacagcatttattgcgctgttttcagcggtaggcgatttattagaaagtatgtttaaacgtgaagttggcttgaaagacagcggttcatgtttaccaggtcatggtggtattctagaccgcatcgatagcttaacagctgctgcacctatttttgtactttgttacgcatggacattgagtttatgagcaaagtagaacaactcgtcgtattaggcgcaactggttcaatcggtttaagcaccttagatgttgttgctcgtaacccagagcgctttgctgtttttgccttagctgctggtaaaaatgccgagaaaatggctgaactatgtattgcacatcaacctaagtttgccgtaatggcagatcaacacgccgcggctgcgctgtctaacttacttgccagtagctcttgtaaaacagagattcttgcaggtacaagtgctatgagcgagcttgctgctcatactgatgttgacactgtcatgtcggctattgtcggtgcagcaggcttgttacctactttaagcgccgttgaggcgggcaaaaaagtattgcttgctaataaagagtctctagttatgtcggggcagctgtttattgataaagtaaaacagcatggtgctactttattgcctatcgacagtgaacataatgctatttttcaatgtatgcctgcggctttacaaaacgggtcgggtttactggccgataatggcgttagcaaaattttattaacagggtctggtgggccatttttaactcgcgatgtcgcaacattatcagctgtgaccgtgactgaagctgtggcgcaccctaattggtcgatgggccaaaaaatatctgttgattcagcaaccatgatgaataaaggccttgaatttattgaggctaagtggttatttaattgccaagcaagcgatattgaagtggtgatacacccgcaaagtattattcactctatggtgcaatatcaagatggctcagtgcttgcgcaaatgggtaatccagatatgcgcactcctatagctcacgctttagcatttcctgagcgcgttgatgccggtgtcaaaccgctcgatttttcacaaatggctgactttacgttcactaagccagattacgctcgttaccctaatttaaaacttgccattgatgcgtgtgaaatggggcaaggtgcaacaacgacggtcaatgcggcgaatgaaatagccgtagccgcctttttaggtgggcaaatcggcttcacagatatttatcgcgttaacgctgaaacgctcaatgcaacacaaaacattaatgtgcaaacgcttgatgagattttagcttgcgaccaagcagcacgtttaaaagcaactgagtttgtcaaaagaggcatcaactagcatgtttgattttttctggaatcttggctcatttattcttgctctgggtattttagtgactgtgcatgaatatggtcatttctgggttgcgcgaaaagccggcgtgaaagtgctgcgtttttcaattggctttggtaagccattagtcaagtggtacgacaaacagcaaaccgaatatgtgattgcagcaatcccactaggtggttatgtcaaaatgcttgatgagcgtgttgatgaagtgccgccagagcagcgtcatttatcatttaatgccaaatcagtaaaagcacgtatagcgatagttgcagccggaccaatggcgaactttttatttgctatttttgctttagctgtcatgtacatggtgggcgttcagtcattaaaacctgtggttggggaagtgactcaaggaagccgtgctgcagctgctaatattgagccgaaccaacaaattattaaaatcggtgaagacgatatcagcacttggcaagatgccaccttctcattgatgagccgtttaggcgagcaaagcgttgttgttacgcttcgtgaccaaaactatcaaaagcatgtgcgtacccttaacttagatggctggaaattagatcagcaagatgtaccaccactaacatcgattggtatagtaccttttcgacctaacgccttactgcaggtagcgatgatcagtaaagggtcagctgcagaacaggcaggattacaggtaaatgataaaattattgccgtaaatggtgaaaatatcagcacttggaacgagttagtttcactaattcagcaatcacctaacaaatccttacaaattagtgtacaaagacaagatagtattaaagagcttattgttacacctaaaggccaaatcaacgattcaggtgttgaacaaggtttcttaggtgtgtctccagtggttgagccatggccagaaaattatattgaaactagacattatggccctgtcgatagtattgtgctgggcatacaagaaacatggcgtttaatcacactaagtttcgacatgattggtaatttaattaccggtcaggtgtcggttaaaaatttaagtggccctgtaggcattgcagtcggtgcgggaactagcgtaagctatggtttggttgcttttttaagcttcttagcattaataagtgtaaacctaggtgtatttaacttattaccgttgccagtgcttgatggtgggcacttaatgtattacataattgaactttttcgcaaaaagccggtctctgaaaagacgcaagaatttggttttaaagtgggtgcgttgctgctcctgtttttaacatgtttcgctttgttcaatgatgtatcgcgtttataacaaatgagcgaaaaattccaatttgaacacgattgtaaaacaccgcaaaagtttaacttacaaggtgttgagcggtaatacagttgtaaaggataaagataataaaatggctataaaaaaacatttggcagtttcaagtttattaggtgcaagctttgcagccctaggccaaaactcctttattgtagatgatttaaaagttgaaggtttacaacgtgttgctctaggtgcagcgctaacgcatattccaatcaacgtgggcgataatattgatgagtatacaatttcaagaaccataaaggctctctatcgttcaggtcactttgataatattaaagcattacgcgatggcaacagtgttattttccgcgtaacagagcgcccaacgatcagcatgatcgaatttgatggtaataaagacatcaaagatgagcagttaaatgagtcgctcgatcagcaagatattcgtacgggtgagccgcttgataaaactgttcttgataatatagaaaaaggtttagttgagtttttccatagtattggtaagtacaatgctaaagtggatgtaactatcactaagctgccacgtaaccgtgtgaagctattgtttaaatttgatgaaggcgatgccgcttctattcgtcaaattaacctcgttggtaacgaattattctctgatgaagagctacttaaattagctgagtcacaacaagatttgccgtggtggaagttcatgtcgagcgaccgctatcaaaagcaaaccattgaaggcgacttagaaaaaattcgtagttactatttagaccgtggttaccttcgttttaatatcgattcaacccaagtttcagttagtcctgaacgtgactcagtttacgtaacagctaatatcactgaaggtgtaaagtacaccgtaaaagggtttgattttattggtgacttgcttggtcgcgaagagttaatcaaaagtgttatcccgctgaaaacgggtgagctttataatggctcggtggttacgtcttctgaagaattcattaaaagctatttagcgcgttttggttatgccaacgctgaagtacgcacaatcccagagattgatgacgagaaaaaagaagttcaattaaccttatcagtaaacccaggtaagcgcgtctatgttcgtcgtattatcgtaggtggtaaccaaaatacctctgatgaagtagtacgccgtgaaatgactcagcttgaaggtgcgtggttatcaaatcaaagcttagagcgctctaaactacaaattcaacgtttaccttacatggaaagtgttgattttaatgttgtgccagtaccgggagttgatgaccaagtagatgttgattttactgttaaagaacaatcagctggtagctttaacgctggccttgcttatggttcttacttaggtctgcaatttaatatcggtgttagtgaatcaaatttcttaggtaccggtaaccaaattggtttcaatatcaatacctcacgcggttctgaacgcatcagtgtttcttatacagacccttactttacgccagatggtgtatcgcaagggagtagtatcttctacagcaactatgatgcaagtaaattcagtctaatcgactataaatcaaagagctatggtattggtacgaacattggcttcccaatcgatgctgttaaccgtatcaattttggtgttcgttggatccaagaagagttatctgacattgctgaatacgagcaaactcgtgtaatgcgtgaaactttcttagacccagaaaaccctgatgcaggttttgactttactaagtatgagcttagtgcaggttggtcgcgtgttaccgtaaaccgtggtttattcccaacggctggttcgcgtcaatcacttaacttaacagcgacaacgccgaactctgatttacagtactttaagataaattatgattcgcgtttctactggccaattagtaatgatcaccgttgggtattctcaacacgtgcagcacttggttatggtaatggttatggtacaaccaatggttatgaccaaacattgccgttccaggagttcttcagaattactgaaatggaattacgtggcttcgatcgaaacacgattctaccacgtgctgtatcgcgtggcccacaagctattcctggtacaccattacctgacggtactacaacaggtaacattggtggtgcatcagagtttgatgaactacgaacagcaggccgaattggtggtaacgccaaagcggtagcagggatggagctaatcgttccaacacctttcttagatgaagaaaacaccagctctgtacgtactagcttcttcgtagatgcagcaaacgtatgggatacagagtttaatattgaccgttatcaaaacctttcaatagaccagcgtgcaatattgtctgattactcagatccaatgcgctttagggtttcaacgggtctttcattacaatggatctctccaatgggtccaatgctgattagttttgcgtatccattgcaaaaagaagaagatgacgatacgaagaccatcagctttaatattagtaatacattctaaaggagtttttacgtgaaaaaatcaatcaaatcaacagccttcgcattgcttgctactttatctatgggcctttcaacaagtgcatttgcgcacaaagtaggtgttgttgatatgcaagaaatttacaagcaaatccctcaaatggcgaaagttgagcagtcacttgaagctgagttttctgagcgtcgtcaagagttagaaaagttacaaggcgatattcgttttgaagctgaaaagttcaagcgtgaatcaacaacgatgagcgataagcagaaagatgaattacgtactaagattcaaggtatgcagcagcaacttgctgaaaaaggccgtcctttagagcaagaaatcaagatgcgtcaaaaccaagagttagctaaggttcaaaagctaatcttagatgcaatcgaagaagtggctaaagctggcaagtttgatgaagttaaagttaaagaaacaacaatttattttaaccctaaaacagtatctgatttatcagataaagtagttgaaaaagtaagtaagcaatagaaatcatatatgcataattacacgctttcgcagattgcggatcttttaggcgccgaacttcagggtgatggcgccacagagattacaaaaatatcaacacttgcaaatgcccaacctgggcatattgcatttttagcgaacaagaaatatcgctcacaattgaacgacacattagccagtgcggtgattttatccgaggctgatgcagcgttttttacaggcaataagcttgtggttgctaacccctatgtatgttacgccaagcttgctcagcttatggataccacgccgcgttcagctgctactggtattcacccaagtgcagtcattcacgattcagccagtattggtgataatgtcgcgatcgctgctaatgtggtgattgaagcgggggctgttatcggcaacgacgtacaacttggtccaggctgctttatcggtgaaaatacaaaaattggccaaggcactaagctttgggcaaatgtatgtgtttaccatgaagtcgaaatcggcagtgattgcttatttcaagcgaatacagttgtgggtagcgatggttttggctatgcgaatgagcgtggtgagtggattaaaattccacagctaggccgtgtaattattggtaacaaggttgaagtaggtgcatcaacgaccattgaccgtggtgcacttgacgatactatcattcatagtaatgtaattatcgataatcaatgtcaaatagcgcataatgtcgagatcggttcgggtactgcagttgctggttgtacggtatttgctggcagtacagttattggtcggaattgtcagattggtggtatggttgcaattaatggtcacattagcgtatgcgatggtgctataatcaccggcatgagtatggtgactaaggcaatcacagaacctgggatttattcttcgggcttgccacatctaaccaataaagaatggcgacgtagtattgcccatatccgaaacctcggtgatatgaaagaccgcattaaagcacttgagtctctaacaaagtcactcaatattgaagacaaataaggatgctattttggcaaatgaattaaatagtcttgatatccaagatatcttgagtttacttccgcatcgttatccgatgctacttgttgaccgtgtattagattacacgccaggcaagtcgttacatgcaattaaaaatgtaacagtgaacgaacctatttttacgggtcatttccctaaccaaccaatttttcctggtgtgttgatcctagaagcaatggctcaagctacgggcttgttaggttttaaaacagttgaaaaccgtagtgacaatgaactgtatttatttgctgcgattgataatgcacgattcaaacagccggtattacctggcgataccatgcatttgcatgtagagtttgtaaaagagcgccgcaatatatggaagtttgcagcagaagcaaaagttgacggcaaagtggtgtgtactgccgaaatcatgtgtgcgagaagagagttttaatagtgattcatcctacggcaataatcgaaccaggtgcaaaacttggcaaaaatgtgtcagttggcccttatagctatatcggaaacgatgtaactattggtgacaactgtatcatcgaatctcatgtggttgttaaaggcccatcgacgattggttctggtaaccatatttttcaatttgcatcggttggtgaagcttgccaagacaaaaaatacgcgaatgaaccaactacgctgatcatgggtgataacaatgtgatccgtgagtgtgcaacaattcaccgtggtactatccaagaccaaggtgtgacaaaaattggtagtaacaacttatttatggcgtacacccatgttgcacatgatgctgtaattggtgataacgttatatttgctaacaatgcctctgttgctggtcacgtacacgtaggtgactgggttattctcgcgggtaactctggtgttcatcaattttgtaaaattggtgctcatgcctttgtaggtatgtactctggcgtaaataaagatgtaccaccatttgtaactactattggcacgccggctggccctgtagcaatcaatactgaaggcatgaaacgccgaggttttgaaagtgatgaagttatggcaacccgtcgtgcatataaaacgctttaccgtaagagtttaggtgttgaagaagctatcgccgagttagctgaagatgcagcaaagtatcctgctgttcagctgatgatagactttgtgaaaagctctgagcgcggcattattcgctaattataagcgatacactaaaagccaccgtaaggtggcttttttgtttttatactaattcgcttaattaggtaaatcagtatagttcaggtttcgctaagtaagcgcttgctacctttatggcaaaaaaaggattcaataatatgaacaaacttatcctgtttgctttattaagtttaattataactggttgtagtactgcgccttcggtaactaagggaacgatagaaaaaggcaaagccagttattacgctgataaatatcatggccgaactactgcaagtggtgaggtgtttaatcaacaggcattgagcgcggctcatcaaacacttggctttggtagcaaagtaaaagtcactaatattgctaataataaaagcgtgattgtgaccattaatgaccgcggcccatttatccgcggtcgcattattgatttatcaaaaaaggcgttttcacaaatcgcatcaacaaagcaaggtgtgattgacgttaccgttgagcagctagattaaaagcgggtaataagctctacgtagtcagcttcattagcaactaattcagcatgacttgcaagggctctcacttgcccttgttctaaccaaataactttatcaacacgacttagcattgctgggtcgtgagtaatggttagcatggttttatctgcccatattttctcaagcgtagtcagcaagttttgcttagtgtggttatctagactctctgttggctcatcaagaatgattatattaccttgccttaatagagcttgggcaatggcaacacgacgtgactgaccatgagatagctttctgcctgcggtgcctaaacgggtgtttagcccatcttttaaattgcttaaccatgagccaagttcagcttgttcacaggcttcaataagcatttcatctgtcgcatcaaaagctgcatagcgaagattctcccgaagcgtgccatcaaaaatatgatgctgctgagccacgatagtcatgcatttgaagcgctgctgatgactaagcttgcttagctcaaaagtattttttttagtggttagttcaagcgtgcctgattggataggccaaagccctgttagtaagttaaccagagtggttttgccactgccgctggcaccaactagagctaatttactgcctgaagcaattgataagttaatttcattcagtgcgttactagttgcgccttggtatcggtaattaacatttttgaactcaaggccaagagcactgtgtggtattgcatgtgcttgcttctgttcattatgctcttcgagtttgtcttcaagtgtaaatagtcgctgtgctgcgcttaaagcatttggtaattctataaacgcacttggcaaagttagtacagtctcaaagctggctaatacaaataacgcgagcatagctagttcaacgtttttcatagtagctgttgcgaccagtggaattattataaatacactggcaagcatggtgagttggatcaccaaagtgcttaagccattactgtttgctatggctttgtgtcgattatatagcaagctgttgtattgcttactgagtgaatcacaatgggcaagctgcgcggcgtgtgcttgatatactgcaagctctctggcacctgatagtgtatcagcaagctcagatcttaactctgctgaaagctgtgtttcagcatgtgcttgttggcgaagtttatggctcaatagagccggaagtaacacgccaataatcatcaatgaaataaagcataacaatgcaacatcagcgttatacattgccatgaatgccattacgataggaatgctgataagagcgacgataattggcagcagcacatttaggtaaaacttatctaacgcatcaacatcgttttgtaggcggttgaacaagtcgctactacgagtcattgctaagtcaacgttgttgagttggctaagagtcttgaacatctttacgcgaatttcgcttagtaacaaaaaggtagcgttgtgagttatcattcgctcgccgtaacgagacgctgtgcgcacgatagctaaaaagcggatcacccctgcaggggtaaagtagttcatctgcacaccggcaatacccgccgctgccatggctgctaaaaaccagcccgagatagcgagtaaaccgacatttgcaagtactgttaagcttgctaaaaaagcccccaaaagcagcatgcctgcatgaggtttgcaaagttttaataaacgtatgaagttatgcatgggcttcaccttggctcacaagcttagcaaataggcctgcttgttcggtgagttgctgataatgaccagactcaacaatttgaccttgttgcataacgtaaatggtgtcggcatgtttaaccgtattcagtcggtgagcaataaccagcactaaatgatcttttgcataatctcggattgcttggttgattaaatgctctgtttggctgtctaagtgagctgtaggctcatcaagcattagcataggggcattttttaaaaatgcacgggcaagggcaatacgctgcttttgcccccctgagaggccttctccttgttcaccaagctgtgtatcaaagccattaggtagggcgtttataaactcaagcgcaccagctttattagccgcttcctcaagttcagcttggcttgcatctggttttgctaatcgtaggttatctgcaacggttcgataaaataatgtggcgtgttgtgggatccacgcaagctgtgcttgccaatcagctaaggcggtatcgctcagtggctgtccgttaatgtgaatggcattgttggcttgatgatgaaaacccaataggcaatcaaacaaagtacttttacccgagccgctttcacctacaaaggcaactaagcctgtgcttggcaggcttaagttgatatcagttaccccttcgtttgtctcagggtagtgaaaagtaagcgcattcagctgtatgtcttttatcggtaactcaagtttagaggtacccaaatgttcatcggcgtcgctttgattgattatatcgaccatatcagcagcggcgctgatcccttcgagttttgcatgataatgagtgcccatttgccgaagtggtaagtaaaactcaggggccagtaatagcaccacaaaaccggtcgcaaaatcgagcgtaccaaaaaataatctaaagccaatgatcacagcaacaagggcaacactaatggtggctaaaaactcaagagcgaaagatgataaaaaggcgactttcagcacccccatggttgcaccacggtaatcatcagatatctgacttatgctatttagctctcgcttggttgcattaaaaagcttaagttgagtcaggccttgtaatcggtcaaaaaagtaattgccaagtaccgctagctgttgccagcgttcttggtttaactgctccgctttatggcccactaaaatcataaaaaaggggataagcggggctgttaaaaggaatatgaggcctgctttgtaatcggttggaaaaattacgaccaatatggctaatggaataagcgcactgtaagccacacttggaatgtagttggcgtaatattgatgcagtgcttcaaccccattatgtaaggtgttaagtgttgcgccgtgacctttttgttcagtgtatgctggtccaagtttgctgagcttttctagcaatgtattacgcatcacgttttttatttttaacgcggcaaggttactcacccgttcacttagcgcaaccaacaaagcacgaactaaaatgagccccgcaagaggccataacaatgggcttacggcttgcaagtttgcttgttcaaacataacttgatgaaccgcgttcgcaagaaggtaacaagaggcaatcattaacagggcattgagtgtgcccagactaatgcttaatttaagaagccctgaagcggactggctatactgctttaaaaaagcgcgcagcgtttgctgctgcgcgcgatttggtcggggtttagttgtcatcgttgtttttgagtctcgcgtatagctctagctcatcatcagcgattgaatctttatgttggtgaaattcgtaccacattacgttgatcacccccagtgtacaggctaatagaacacctaaaatccaggcaaaataccacatattttaatctccttaatagctaccgtgagtgttgttttcaatttcactgatggttactttgcgccacatcttcacataacaccatgttgtgtagataagaataagtggtacaaaaataactgcagcaataaacatcacgttaagtgtcatatggctcgaaaccgcatcccacatggttaaactaatattagggttgttgctcgaaggcataacaaacgggaacattgacatacccgcagtgagtatcacgccagcaagcattaggcttgaagcgatcagtgccatcgctggtttttgtaatttagataacactattgccagtgccgccataacgaatgcaagggcagggaacagcatggttaatggcatttttgtatagttatcaagccatgcccccggtgcttgcgttactgttttagccagtgggttggcatagccttgagtatcgcccatgctgacgattgtataaccatcaagttgagatacccacacacctgctaaagcaaacaatacaataaacgccatcagtgcatatcggccatattgtgctgagcgttttgcaacctccgcatcagttcgaagttgtagccacataccagcgtggccaacgagcataagtacactcacaaggcctgcaacaatggcaaatggatttaatagcgcgaagaatgagccttggtagctaacacgcagtaggtcatcaatgtgataaggcacaccttgtagcaagttaccaaatgccacaccaaatactagagccggaataaaactacctgcaaataggccccaatcccagttattacgccagcgcggtgaatctatttttgagcggtaatcaaagccaagtggtctgaaaaatagcgcaaataataccagcatcatggcaaagtaaaagccagagaacgcagccgcgtagaccataggccaggctgcaaaaagcgcccccccagcagtgatgaaccaaacttggttaccatcccagtgagcaccaatggtgttaataaccgttcggcgttcaacatcggttttacccactaggcgaagcaaaatagccacacccatgtccataccatcggtcactgcaaagccaatcagtaatacaccaattaacagccaccaaattagtttaagagtttcgtaatcaaaaatcatgattgagctccttggcttgcaagactatctgctttgacaagttcatggtgatatttaccagtatgaagcgagcttggcccttgttttataaagcgcagcatcagccaaccttcaaccgcagcaagacctgtgtagaatactaagaaaccagtaatactaattaataggtcattgaccgtcagtgatgaggttgccaagaaggtcggtaaaatttccgaaatagcccacggttgacggccgtattcagcaacaatccaaccaaactcaatagcaatccaaggcagtggaatactccataccgcagcccacaataaccaacgcttttgctcaataattcggtgtgcgttgtaataaaacgataagacaaatacgccaagcatgatcacaccacaaccaaccatgatcctaaatgaccagaacattgggcccacttgagggattgaatctttcactgctttttgaatgtgctcttctgttgcatcaaccacgttaggcgtatagcgcttaagtagcaaaccatagcctaaatcagcttttaaggtatcgaattttgcaatgttttcaggagtgtcttcaccgctgcgaagcttttctaagtattcgtatgcaatcatgccattacgaatacgcttttcatgctgctcttcaaggtctttaatgcccgttacttgctcgtcaattgagcgagtagcaataatacccagtgcgtaggggatttttacagcggcgtgagtgacttgctcttctgagtcaggaatacctaccagcgtaaatgcggcaggggcctcttcggtgtgccactcagcttcaatggttgcgagttttactttttgtacctcgccaacttcgtagccagattcatcacccagtaaaatcacacacaaaattgacgctaaaccaaaccctgatgcgaccgaaaatgagcgtttggcaaaagcaaggtcacgaccttttaagatgtaccaactactaatacccagtacaaacatagatgctgcaacataacctgctgatacagtatgaataaacttaacttgtgcaacagggttaaataccagttcagcaaagctggtcatttccatacgcatggtttggtaattgaattcagcacctaccggattttgcatccaaccatttgcgactaaaatccatagtgcagataaattagtccctaatgccattaagaaggttgcacctaggtgctgacgtttactcaaacgctcccagcctaaaaagaacatacccacaaaagttgactctaaaaagaaagccattaagccttcaattgccagtggtgcgccaaaaatatcgcccacatagtgagagtaataagaccaattggtaccaaactcaaactccatagttagacccgtggccacaccaatcgcaaagttgataccaaacaatttcccccagaacttagtcatatcacgataaatttcgcgaccagtcatcacgtaaacggattccatgatcaccaaaatccacgtcatacctaaggtaagtggaacaaataggaagtgaaatagggcagtgattgcaaattgcaatcgcgatagatccacaaatgtttcatctatcatcgtttagctccttgttagcgggtgcggtagacacgacaaaaatcggttataaagtttcagtaattattgaaactttgtgaattctaaccttgtatccattttagtcaatagaaaagtacgaaaaaaagacagacagcctctgtatatcttttctacaggttagagataatgctctacactttcaaatatttaatcgttataaaaagctcatttactatggcttacttagttaatttttattatttttaagaatctgactaattatctaccgctacttttagcggtaaactgtgtataaagaatcgacgactttttagcgtaatttcgatttctagtatttattaactctgtgacatttatccgactgctaaaacacggtaaactcatttacattagtgccaaaagttgcgaattatcaacgaatgaaagaacatacaaagccgttacgtattgccttggtggcaggtgagttatcaggtgatattttaggtgaagggttaataaaagcacttaaacgccgttttcctgatgctatttttgaggggattgcgggcccgcgtatgcaagcggctggttgcaatacattattcgatatggacgaattatcagtgatgggcttagtcgaagtgcttggccgattaccgcgtctactcaaaatacgcaaacaattggtgcagcattttatcgacaacccaccggatgtatttattggcattgatgcgcctgattttaatttacgtgttgaaaaaccgttaaaagatgcaggtatcaaaacgattcaatatgtcagcccgtcagtgtgggcgtggcgcgaaaaacgtatacataaaatcagtgcggctactaatttagtgctggcactattgccatttgaaaaagctttttacgataaacacaatgtaccttgtacatttgtgggtcacacattagctgatgatattgcgcttgagcacgaccaaaccgaagcgcgtaaccagcttggtttatcacaaacagataaagtacttgctttgttaccaggtagccggggttctgaagtagggcttttaagcgaaacctatattcaaacagcagcgaaattacaggcgcaaaatcctgatcttaaaattgtagtgccgttagtcaatgaaaaacgaaaagcacagttttgtgagattttagaaagaacagcccctgatttaaaactgcaattattggatggtcaatcaaaccttgcaatgcaagctgctgatgccattttgcttgcctcaggtaccgcaacgcttgaaggcatgctgtataaaaagccgatggtcgtgggctacaaaattaagccactgagttattggatttttaaaacactattcacttttaacattaaatatttttcgttgcctaatttattagccgatgaagaacttgttccagaatacttacaaactgagtgtaatgttgaaaacttatcagctgcgctaacacctatgttgaatacggataacagcgaattaaaagcgcgctttttagctattcataaagacataagattaaatgccaacgaacaagctgcagctgcagtcgcggagttactaaatgcaaattgaacgaccgaatgttaattatatagcaggtgtagatgaagttggccgtggcccattagtgggtgatgttgttaccgctgcggtaatacttgatccgaataagccaatagcaggtttagctgattctaaaaagttaacagataaaaaacgccaattattagcgatagaaataaaagaaaaagctctgtgctatgccattggccgttgcagcccaactgaaattgacgagttaaatattctacatgccactatgcttgcaatgagccgtgcggttgaaggcttaagagtaaagcctgagtttgtttttattgatggtaatcgtgtgcctagccagttaactgtgccagcacaggcggtagtaaaaggtgacagcctcgttgaagagatttctgcggcatctattttagcgaaagttgcccgtgacgaagaaatgattgagcttgataagcgttatcctgactatggctttgcaggtcataagggctatccaactaaagcgcactttgcggcactcgaacaatacggggcaattgcagagcatcgtaagagctttaaacctgttcagcgcattttggcgttgaaaggagagcaattgtaatgcctgcgccgcaatttgttcacttacgtgttcactcagatttctcaatggtggacggccttgctaaaaccaagccgattgtagctaaagctgaagagttgcaaatgccagcgctggcaatcactgaccagatgaacttatgtggtttggtgcgattttatggtgcggcgcatggcgctgggattaagcctattgttggtgctgacttttggttaagaagccctgaatttgaggatgaaccaagtcgcattaccatcttagcgaaagataacgaaggctataaaaaccttaccttattgatctctaaagcgtaccagcgcgggcatttatttcatcgccctgtggttgaccgcgaatggttggtagagaataaaaatggcctgattttattatcaggcgctaaagatggcgacttaggcaaagccctactaaaaggcaaccctggccttattgagtctgtggttagcttttataagcagcactttagcgatcattattatattgagcttattcgtactgaacgccccctagaagaagattatctgcatctggctgttgagcttgccgcaaaagagcagttacctgtggtggcaacgaatgaagtggtgtttttaaaaccagaaaactttgaagcccacgaaatccgagtggcaatccatgacggttataccctagaagataaacgcagaccaaaacgtttttctgagcagcaatatctaaaaacagcggagcaaatggctgagctatttagcgatattccagaagcgttagaaaacaccgtagaaattgccaagcgctgtaatgtaaccgtgcagctaggaacttacttcttacctgattacccaaccggttcactgaaaattgaagacttcttggttaaagtctctgaagatggtcttgaagagcgtttacagtttttattccctgatgagcaagagcgtaaagaaaaacggggtgagtatgatgagcgtctgaaaatagagctcgacgtaatcaaccaaatgggtttcccgggttacttcttgatcgtaatggagttcattcagtggagtaaagataacaatattccagtaggtccaggacgtggttcgggtgccggttcactggttgcttatgctttgaagattaccgatctagatccgctagagtttgacctactattcgaacgtttcttgaaccctgagcgtatttcaatgcccgatttcgacgtcgacttctgtatggataggcgcgatgaggtaattgaccacgtagcggcgctttatggccgtgacgcggtatctcagatcatcacctttggtaccatggctgcaaaagcggttatccgtgacgtaggccgtgtacttggtcacccttacggctttgttgatcgtatttcaaaattagtaccgggcgatccgggcatgaccttggctaaagcgtttgatgttgagccgcgtttacaagaagcctacgacggtgatgaagaggtaaaagagcttatcgatatgtgtcgcatccttgaagggtgtacacgtaacgccggtaaacacgctggtggtgttgtaatatcaccaaccactatcactgactttgctgccctttattgtgatgatgaaggtaaattccctgttactcaatttgataaaaacgacgttgagacggcgggcttagttaagtttgacttcttaggtttaagaacgcttaccatcttgcagtgggcgcttgatatgaccaatgagcgcttagcccgcgagggtaaagagcccgttgatattaacgccattccacttgatgacaagccaagtattgagttattgctacgcgctgaaaccaccgcggtattccagctcgaatctcgtggtatgaaagatcttattcgtcgtctaaagcccgactgcttcgaagatatgatcgcactggtggcactgttccgcccaggtccattgcaatcaggcatggtagataactttatcgaccgtaagcacggacgagaagaaatatcttacccagacgttcagtggcaacatgaaagcctacagcctattcttgagccgacctacggtatcattctttatcaagaacaagtaatgcaaattgcgcaggtacttgccggttatacccttggtggcgctgacatgctgcgtcgtgcaatgggtaagaaaaagcctgaagagatggcaaagcaacgttcgacttttgaagaaggcgctataaataatggcgttgacggcgaacttgcaatgaaaatcttcgacttggtagagaaattcgcgggttatggttttaacaaatcgcactctgctgcttatgcactggtgtcgtatcaaacactgtggatgaagacccattatccagctgagtttatggcggcagtaatgtcggcggatatggataacaccgataaaattgttaccttggttgatgaatgtgaaaacatgaaactgaccttgttaccgcctgatgtaaatgccggtgagtacaagtttactgttaatctaaaaggtgagattgtttatggcattggtgccattaaaggcgtgggtgaagcaccggttgaagctattttagaagctcgaagtgaaggcggcccgtttaaagacttatttgatttttgtgccagagttgacttaaaacgcttaaacaaacgcgtggtcgaaaaacttatctatgcaggcgcactcgatcaacttggtccagataaaacccagccaggtcgtgcgaccttattagcgagcttaaaagatgccatgcgagcagctgatcaacatcataaagcagagtcattagggcaagcagatttgtttggtttattggctactgaaccagacgaagttgaacaggcgtttatcaaagcgacagacttaactgataagcaatggctagacggtgaaaaagagaccttagggctttacttaactggccatccaattaaccagtaccgtaaagaactaaagcattacacctcgggaaggctagtagacttgcagcccacaaatcgtgatgtgcagtcaacagcggctggccttgttatcaatgcccgaaccctgataaataaaaagggaaatcgttggggtcttataactttagatgacaagagtgcccgtattgatgtacgcttattcccagaacagtttgaaatgtaccaagatatgctgcaagttaacaatatcttggtaatatccggacaggtcagctttgataacttctctggtggcattacaatgaccgctagagacatatgcaccattgccgaagcgcgagaaaaacgtataaaagcgattaaaatgacgctgaatatggtgcagatcgaggcaaacttcttcgataatttacaaaaagtacttgaaccttataagtttggtacatgtcctattaaagtattctatcaacgtccggatgcgttggctgagattaccttagggactgaatggtgtgttacgcctagtgatgacttaattcataagttgtcattgatggcggcgcaagatgtagaactagaatttaattaattaggtagtttagagcatgagcctcaattatcttgattttgagcttccaatcgcagaattagaagcaaaaattgaagaattacaaaatgtaagccgcgctggcgaattagaccttggattagaagaggaagtcagtcgattaaaagaaaaaagtgctgaaatgaaagagaaaattttctctgaattaggtgcttggcaggtttctcagttagcccgtcatccgttgcgtccttatactcgtgattacatcgagcgcattttcacggaatttgacgaactagcaggcgaccgtaccttcgctaacgacccagctatattaggtggtattgcacgttttgaaggtcaacctgtaatggttatcggccaacaaaaaggtcgtgacacggctgaaaaaatcaaacgcaactttggtatgccaaagccagaaggttaccgtaaagcattacgcttaatggaaatggctgagcgctttaaaatgccaattatgacatttatcgacacaccaggggcatacccaggtgttggtgctgaagagcgtggtcaaagtgaggctatcgcacgcaaccttaaagttatggctgcgttaaaagtaccaacaatctgtactgtaattggtgaaggtggttcaggtggtgcacttgcaattggtgtgggcgaccgcgttaacatgttgcaatacagcacttactctgtgatctcgccagaaggttgtgcatcaatcttatggaaaagcgcagataaagcaccattagcagcagaggcaatgggtgtaaccgcagcacgcgttaaagagcttgatttaatcaacaatgtgattgaagagcctttaggtggtgcgcaccgcaattacgatgcgatggcacgtaaccttaaaaaccaacttaaacgcgacctagctgaattacaaggcctttcacttgatgaaatgcttgatcagcgttacaagcgtttaatgtcgtttggttattgctaaacactgcttaaaattgaaaaaagccgcttttgcggctttttttgttttataatgctgataacacagacgcttgtatactcattggtttttaatgcaaacatcagacttatatcaccattttttagctcaattacggccgttgctgaacgctgaacacagctgctttagtgttgccttatcaggcggtgttgactctgttgtgttgttacatttaatgaaccaagttcaaaagcagcgcccagagcttaagcttgaagctgtgtatgttaatcatggtttgagtgagcatgccgatgagtggcaaggattttgtaagtcactatgtgaagagctcggtgtagcatttaaagcggtgcgcgttgaaatccaagagcgctcgcgcacttcactcgaggcacaagcgcgagaggcaagataccaagctcttgacgaaaactgcgaggtaggcagtgtaatactgcttggtcagcacttaaatgaccaactcgaaaccttcttgttgcggcttaaacgcggctcaggcttgcaaggcttagcatcaatgccacaaacgcgattattagcgtctgggcgagtatgttttcgaccgctgattaatatcactcgtgagcaaattgaacagtttgccgttaaatttgccattagccatatcaccgatgactcaaatattgatgagcgctttgaccgcaattttttacgtcatcaagttttgcctattttaatggagcgttttcaagggtttgaaaagagtgcagcgcgcagtattcggctgttaaaacaacagcaatcgctgctcgatgaatatacgcaaagtgaccttgcacactgccaaaattcacagggtggtttaagctgtgttgcaattgcggagtttagtaagcctagacaagcaaatcttgtgcgtgcgtggctaaatcagtttacccatcaactaccttctgagaatcagctacagcaaattattgaacaaggtttaacggcacaagctgatgcgcagctaaaaatttgtttgcaaagcggcgatgttcgtcgtcatcagcaacattggtactttgtgactgagcaggcaataccacaggcaatggatattaacttacagcctatagagctcactgatggccgtaaacttatcgttaagcaggggaagggcatcagaaagcctttaaaaaatgagcaagtaagcgttgaatttaataagccgcaagcacgtataaaacccttaaaaaaacccggctcaaacaccttaaaacattggtttaaagatgccaaagtggccccttggttacgtgcgcaaacaccacttattttttataacgatcaactcgtgcaagtagtgggctatttcactagcgctgagcacagtgttgatgaaggaattttttgggagatattctatgagtgaacaaccacatgttggtttatcactagttaataaggcaccactaggtttggtgttgtcactgttagttgctgttattgctagttttgtttatacagacttgagcttactgacactactttatgccttagctggcggcctgttgtgttcagtattgctactaggatattggtcaggtaaaggtggtatattctttattttaggcgtacttacgccattggccttagtgatggtatcaccccttaccaccatggctgcattgctctacttgttaagcggcttttttgctggcttttggctggtattactttgctataagtttaaagttaaaaaagcctagcgggggatgctaggctttctgttaattaaaaagctctggcgcagtttcttcctgctgctttagctttgtacagacctttatctgcacgggcaaatacatcattttcgcaatcttggttagttgctaaagtataaccaatactagaagttacgcggtattgtgtcatcaagttagactttttcaccagccgcataattcgctctgcaactactttgttagttgtgaattctgggtcgtcaattagtagtgcaaactcgtcgccaccaaagcgaaaaattgagtctgttcctctaacactactgcatagtacttctgagaactcttgtaaaacatcatcaccaattttatgaccgaaactatcgttcacttgtttgaaattatctaaatcaagcaacattaggctaaatggtcggttttggcgacgacaacgttcaagcttttgcgccaaactgtcattaaattgacttcggttatttaagcctgttagggcatctttcgttgccaaacgtaatacgcggttatacataatggcattacgaagtggataaaccagcgcactgtgtaactgttctaatttagcttctatgcctttacccattgggaattggctaaagtaaattaattgccctaaacgctcactttcgatatctaaatcaaaagagtaaggcgtttgagatgtatcactccctgcactctgagacacgccgagtgaagactggaactgtaatcccgataaattaatcagttgttttgcatgattagcaaaaatcgtcagtatattctcaattgaaagtgtggtttgcagcttagcaattaagtcatgtggattatttgtttcatttattcggtaatgctctgccgaaaacggcagaaattcgcctcgcgcagacactcgctgcgtcaaaatatggacattttccattaaaattctccccccggagtgtttagttactcctacttagcgagatttgtgccacttttttaaactggctgaaaaacaaatggttgctatagttaaagaaggctacagctttatcatcaagtagaagggagtttattgcttgcaaaatgtgctgattcaagtgtttggcttgctagttgctgccgtattatttgtttggttcttcaaacgaattggcttaccacctattcttgcgtacctggcaactggggtgttggcggggagtcacggtattggctggatggcgcaaagccatgaaatgcactttgtggctgagctaggtattgtgtttttattatttagtttaggtctagagttttcgttaccccgtttaagggctatgcgtaatatcgtattcggccttggctcattacaagtggttgtcaccagcattgtgtttatgctgattttgttgctgcttgattacagcttactaaatagttttaccattgccagcttaatggcgctatcttcaaccgcagtggttgtaaagctacttaaagaatctggagagcttaaccaacgacgaggccaactagccattggcgtattgctattccaagacatcgcggttgtgccactacttattgtttatccactgctagcacaaagcggctcagaagaaattgtaggcgcattggcgtttgcactcactaaaggcgcattggtttgtgttttactatttgctataggtaagtggatactccccaaggtatttagcgaaatcgcattagtgagaaccgatgagctatttatgttaaccacgctattggttgcattattcgcagctgggcttacatacttgtttggcttatcaatggcattaggcgcttttttagcagggatgatgttaggagaaagtcattaccgtcaccagctagaggcggatattcggccatttcgcgatattttaatggggctgttctttgtcacagtcggtatgcagcttgatgtactttatgtgcttagtagttggtattggatcatcactgtactggttggcttgttgttctttaaaatagcggtgttatcgattgctgctcaagtaatgggtgagcgtaagcaagatgctgtttctgcggggatcatgctttggcaaatgggggagtttggttttgtacttattgcccttgcttcgcagcaccttttaatcagtgcagagcaagcatcgtttttaattgcagtaggggtgctatcgatggcactcacgccttatcttattgaaaaaacaccgttaattattaaaaaactcggccttttaagtcaaactgggcaacattggcagcaacccgctgcgagtagtccgttgtaccataaccatgttgtgatctgtgggttttcacgggttggacaaaccatcgcgcggtttttaaagcccgaggcaattgagtacgtagcagtagagagtaatcctatcttattgcaagaagcaaaagccgctggcgagcctgttatatttggtcatgtaaatcaaaaagatattttaaagtcagctggggtagagcgagcaaggctagtgatcattacctttaccgactttgagcaaacacaaatagtggttgatgccatcaagcaaatcgctcccaaggtcaagattcttgtgcgtatgcgtgatgatagtgagctcgaaacactaaaagaactgggtgtgacagaagtggtgcccgaaacccttgaggcaagcttgatgctagtttctcatgttctttatatgtcgggagtgcctatgactcgcattatccgcagagtaagtaaagaacgtcgtaaccgctaccaatttttaaatggcttttttaccggcgacaagctcgatggagaagaagcaagttcagaccgcctagaatatttgcatgttattgctttacccgagcgagcttatgctgtgaaccaaaaaatcagcgaattaaaacttgaacagcgccgagtatctgtaagggcgctgcgtaggcaagaccgtgaaattgacgctccatcatcgcaaactattttactggctggcgacattttagtgctacaaggtaaaccgcgccgagtagagcgagtagaacgttttttgctggatggtttggagtagctaatccagctctaagaatttacgaatttcagggagtttattaaggccatcttggtagccaatctcgatgagcttttgtgtgtaacgcttctcaaacaataagtagctggttaagcttgattgcgagcgtttttttaccccgataagacgtaataacactttaatcgccattggcatatcgtcataaaactgtgcggcaatcacattaaagttctgtgaggggttaatcacgcaagtttcgatttgctttaattcttgatgtttgtcgcgagcaggtaacaggctcaaggttcggttgatacgttgtaaacgctctaaatcagactgcaaggtatcggtaaatacactgtcgagtaagtgaccagcaatatttgaaagtcctgggtagtgtggttgatagcccggaggatgtggtgcttttggttcgtctacaccaatgataaaaattttctcagcgcctaaatgcacagaagggctcaagggcgatagctggtggattgagccatcaccaaaataatggttatgtacattcacacttggaaaaaccataggaatggcacttgatgccattaaatgctctacatttatacgtgttgcttgtccctcgcgcttcgctcggcgccaaggtttttgagtaagcgactgaaaaaatgccacagaatcacctgtggtataactagaagcagtaatagacacagcatctaaataatttttatgcagatttcgctcaatacgagataaatcgagtatttcattgagcagttttctcagcggcttgttattcaataagctcgctggtgggtggtttatatgctctgactggaagcttgttagcatattgcgcagaatatgcagaaaaacactgatgaagtcgcttttataaacttgcgaagtagaaaagttcttccatacccattctagttttttgctcgctaaatgagcacaagaagcataacatgctaatgcagcggaattaattgcgcctgctgatgtcccattaattatagtaaacggtaaaggggcagtacgcggcatgctttgagtaactgcttttagcacgcccacttgataagcagcacgagcgccaccacctgtaagtagtaaggcgacttttgaatgctgtgttttttttaacttagtacccatatttgcatttaactagttgtgcgtctttactttatttatcaactgtaagtctttaagctagaagaagcaaagtttagctcgcgagttacgttaattttcgtctttttgtttgtttttaaagggagtgtgtatgtctgagcattcgtcagagcctacagttaaatcaggttcatcaaataataatcttatttttgcggttgttatattaattattatcgccggtgttgcggcgtttattttattgaaaccagaagagcagccagtgcaggttgttgaagacattgtcactgaagaagtgcctgtggttgagtatcaaaaccctgagcctgaacctgaaacctcagagccagaaccagagccagttgtggttgaaacggctccagagcgaaccccagagccagtaccagaggtagagccactgcctacgctcaatgaaagcgatgaagtggttgtagcacgtatggatgagttattaagcgatcaagtgatgagcttaatggtgaccgatgaccttattcgtcgcggtgttgtgtatgttgataatatcgccaaaggtaaagtggcattaagccatgcgcctgttgagcgccctaaagagtcatttaaagtgattgaaggggatattttaacaatcgatccaaatagctatgagcgttacaccccttacgtaaaactatttactagtttaagtgctgcacaagttatacgtatgtatgacgaatacaaaccgctgattaacgaagcttatgctgaaattggctacgaaggtgatgcattcactggcacgctagaagaggcgattgacgttctgcttgatactccagaaccaaaaggtgaaatgccgttagtacgtaactcagttacttatcaatatgcttattctgagtgggaaaatttacctgatgcgcaaaaacaattgctgcgtatgggtccagagaacatgaaaaaagtaaaagcagctctgcgcaacattaaagctgagcttgaaaagtaattaacgaaaatcacttatttactgtgcgattgtatactaagcatgcaatcgcactttctttttcgaataccccttgaataacaggctaaaactagagataatccctcccgcgccgaacgaggctctcaatggtagtcttattggtcctctcgcaacactagcaggtgaatctggtcaggcccggaagggagcagccacagcgtgtgacgtgtgtgccgagatgtggctggtaagactgccacccaaaattttctttgtgaagtttgaagtgtaagtctgcaaatttgtatcaaaaccctgcataaactttgaagaataatcctgcatagtctatttttatataatctcacatcgttggtgatgattatgataaggcgtaaactaaagcactccagagttaagaatctttataagtttgcaagtcaaaagaataaagccacttgcttagttgagtcatctttagagttcgatgcatgttttcactttgaatactctcgcgaaataaaaagctttgaagcacaaccattaggctttcaatatgagtttgatggcagaatttgccgttatacgcctgattttttgctgacgcatcatgtgaagccgcaaaaatttattgaagtgaagccttacagtaaaattgcgaaccctgaatttagagcacgttttgcgcaaaagcagttagttgccaaagaacaaataggcattgaactgatattagtcaccgacaagcaaattcgtgtttatccaactttagacaacttaaagttgcttcatcgttattcgggatttcagtctttaaccgagcttcaactttctatcattcagctactcaaccaatggcgaaaactcactattcaagatttggtgaggactctaaaagcttccatcggtgaggtgcttgcatctgtatatcgtttattgtctcttggcagtgttaattcagacttaaacacagaacttactttagagtcggtgatttgggctgatggagtttgaagatgagtttagttttgaggaagcaccgcaaaagttagctgaaactgctgaaccagaagagtctaaccatcaacctcgtgatttagagtcactacctaaggaagtgcaggaagctacacttgctcgacttaaatacgtcaaatggcttaaacagcgtttaattggtggttggacgcagaaaaacttagcaccactacttgctgaaatgcctgaatttcaaggacaagaaaaaccaaagtggcgtacggttgctggttggcacgctgactatatcaaagccgaagaagacattcatgcattgatcccaaagcaccatcgtaagggcaaccgccaagcccgtaccgatacagacaaactctttgaacttgccctcacgcgttatctgactaaagagatcccgaatgtagcatcagcacaccgtttttattgcgaccaaatcgttttagaaaatgaaaaagtgttaggtgagccactaaaaccacttacctataaagcgtttaaaaaccgcattgataacctacctcagtatgaggtgatgcttgaacgctatggtaaacgcttagccgacattgaatacaacaaagtgatgagccataaaaggcccactagagtgcttgagcgtgttgaaatagaccatacaccactacatctcattctattggacgatgaacttgatgtgccattaggaagaccaactttaaccttactcattgatgtttatagccactgcgtcgttggcttttacctcggttttcagagtcctggttacgatgctgtgcgcagagcgataagtcatgcgatgaagccaaaaagttatcttaaaagtacctatccagaagtcgtaaatgaatggccgtgttgtgggaagatagaaactttagtggttgataatggtgccgaattttggtgtcagtcattagagcttgcgtgtgaagaggttgggataaatatcagctataaccctgttggcaaaccttggcttaagcccttcgttgagcagttttttaaaaccattaacgaaatgatgctttcgccatttcccggtaaaacattctcaaacatgctcgcaagacacgattataacccgaaaaaagatgccatattgcgttttggtacttttaccatgttgtttcataagtggattgttgatgtttatcatcaatccgcagacacgagatttagatatatccctcatgaagactggaacaaagggtttgctacactgcctcctgcacagttaacggaacaagatacagacaagttggatgttgtaatgtgcatggcgaaagagaaaacattgcgcaaagggggtattaagaatctacatattaactacgacagtgacgaactctctttataccgcaagcgatacagccccaaaaagagcataaaggttaaggttaaaataaacccagataatctgtcgtatgtatacgtctacctagatgccttacagcactatataaaagtgccaagcattgactcagagggctacacaattggcttgtccctgatcaggcataaaatccatcttaagtttcatagagactacattcaaggcaaaatagatctattggggcttgccaaggcgcgacaatttattgatgagcgagtgaaagaagaagcgcgacagcttaaaatcgtcgggtcaaaaactaaggtcactggtaccaaagcaattgctcgggcgcagggcatagataatactcaagtcaaatccattgctaaaacgtttgaaacaaagcaagctgaaccaactcccgctgacactaagcctaaaaaagatgatgatagctgggatgattttgtctcagatcttgaggcgttttagttatgctgaccgaggctaaaaaggcaaaactcaatcaattcaaagcggtgtttattgaatacaccataccaaagaccatcataaacgattttgacaaattgcgtttgcaccacgaccttgcaggtgaaaagccctgtatgatgttaagtggtgatactggctgtggtaaatctgcattgattaaacattattacgaaaacaacccaccacactttgctgatggtaggcgcaaagtacctgtactgctgagccgaataccgagtaacccatcaattgaatccaccttaaagcagttgctacacgaccttgggcagtttggtgctaaatctagcaaacgacttaaacatggcaatgagatagcgctggctgaaagtttagttgagcaactaaaacgctcaggtacggagctaattattattgatgagtttcaagaacttgttgaaaacaatctaggtaaaaagcgccgagacattgcgaatcagtttaaatacatcaatgaaaaagcggggatctccattgtattagtcggtatgccttggatagatcaaatagccgatgagcctcagtggtcttcacgtatttttattcgccgctttattccttactttaaaatatcagagaaaaaagagcttcaactatttattcgtgttcttaaggggtttgcaaatcgattgcctttttcagacaagcctcgttttgaggatttggatatcgcattatcactttttgccatttcaaatggctgccttcgaaagctgaaaaacttcttagactcagcactcactgaagcactcatctgtgatgcagtaacgctcaacaagcaatgcttaagttctgcgtttaaggcttggcggccagaactcgacaatgtatttgagatgaatgttaatgaaattcaaggctgtgaggtggaacagtattccacttttaaacccgacgggcctcaagatgaagacccatttatagatacccagttttgtaagaaagtcccgttggtgcagttgttgaagaagtgaattgtaaatgtaatgttcataaaaggtttcttttaaggcattatagcttgatagtggcagcagtctgcaaattgttatcagggaattaaagatgaaaattgaattcatagatattcagaattaccgtaagttaaagtctactcgtatttatcttggtgatgatgaaactatatttgtaggggcgaataacagtggcaagacatctgctattgatgccttaattggttttctggaccaaagagtaaaaagcaaggaaagtagtgaaataggtagtcaaaggcgatttgcaacgacggactttactttgtgtaattggtcgactctgaacggctatgcaaaatcttggtctgatcctgataacgtttctggcaattctctacatgagtggcagccattttgcccaagcctagatatatggctgaaagtggatgttgatgaaattcacagagtaagccacttggtgcctactttgaagtggaggggaggactcttgggagtaaggttgatttatcaaccaaaatcaatagaaagcttaatgcatgatttcttgcaagaatataatgctgcattattagtaactgaggagttaaagccaaaagagggagttaagaagttagaactttggcctagggatatgagggaataccttgataagaagatgaactcttattttgacgttaaagcttatctgttggacccaacagttgcagaagaaaatctaattcctcaaaagctttcggaggaccaaatacctttgaatgcatatccatttcatggcttattcaatgttaatgtgattgaagctcagcgggggttttcagatcctcatgctagtaacaatttaaaggggcctagcagcctatcatctcaactaaaccagtattacagcagacatctaaatccatcagattatcctgagaaagaagatatcgaagccttagaagctatagacaatgcaaagactatctttgatagtaaattaaatgaggcattcaatgatgctctaggtgagcttaaaggacttggttaccctggttttaatgaccctgatatatttctttctagtaacactggtccagttgagcaccttgctcacaatgcaaccgttatatttgatatccagaaatcggacaaagatcaaattagagagctagctctgccagaaagctacaatggacttggttataaaaatctcatttatatgatctttaaacttattgggttcagagataattggatgagaaaaggaaaagcggaaaagcgcagaactgaggatgatattgccaaagaaccactacacttagtactcatagaggagccagaagcacatttgcatgcacaggtccaacaagtgtttattcgcaaagcttttgaagtactaaaaaaaggagttttagcaccatttaatacccagttagttgtcagcagccactccagttacattgcacatgaagttggttttgaaaaacttagatatttcaagcgtcacccttcgactgagcttaacaggtcaccaagggctgaagtgatagggttttcaaatgtatttggcaatccaaggaaacgagataatgatagtgaactaactgcaaaatttgtaactcgttaccttaaaacaacacattgtgatttgttttttgctaatggagttattttggtcgaaggtgcagctgaaaggatgttactaccacattttattcgtcataaatttgatggacagtttggcttaaacagaagttatatctccattcttgaagtcggtggtgcacatgctcaaaggttaaagcctttgattgatgctctaggcctgccgacactggtgataactgatacagatgcaacggatccagagtcaaataatagctctactcagccacaacgaggaaaaggtcaacgttcaggaagtagtacgctgaagcagtggttcaatctcaatacggaatctttggacgaaattcttgatctaggctccgaaagcaaagtactagggaatgcaagagctgcatatcaatatgatattgaagtcaaatataaccataagcaagaaggaaaagcgattccttatacatttgaagattcgcttgcccttactaatatagagttactaaagaagctaacaaagcccacgggtatgatgaagaaaatgaaagacgcctgtgagatggatactttagagaaatgtgcagaagctatgtataaagctctagacaataaagggaaagctcaaatggctctggatattatttatgatattgatcctagcgagttattaatacctcaatatgttttagaggggttggagtggcttcaaaatgaactacataaggcgagtagagatttcgtaactgaacagctagtaatcgaggaaacgctcagtggacaataacttccctctgcactttgaagacgtcgacaaggaaatatatcgttatcttaacttagattcacccacaagttttttgctgtttgctggtgcagggtcgggaaaaacgagaactttggtgaatgttctagagcatgttaaacaaaatgatttacaccgttataacgacataggtgcgaaaattgcggttataacttatacgaatgccgcatgtgatgaaattaaacatcgacttcaattcgactctgcctttaaagtatcaaccatacacagttttgcttgggatttgatcaagccgtttactcaggatattagagagttccttaaaaataggttaacggttcaaattagagagctcgatgagaaaattggaaaagcacgtgatcctaatggcaaaaccgcagttcaaaatgctaaaagcagagacagaaagataaaccgtttaaaagtactagatagtattactgaattcacatacagccccacatcgggaaaacctgaaagagacgcattaaaccatactgaggttattgcaatagcatccgagttcattgcaaatagcccgttaatgcacaagctactaacgaatcgattcccagttttgttgattgacgagagtcaggatacagataaacacttaatgaatgcacttatcattgttcagaaaaattacaagaggaatttcgctctgggtttgtttggtgacatgatgcagcgcatttatggcggggggaaagaggatctagattcaagtttaccagatgactgggagcagcctgcaaagttaataaactataggtgccctaaaagaattgtaacgcttattaatgctataaggtttgatgtggataaggtgcagcaagaaccaaaagataatgccacagatggattggtaaggctgtttatcgtggatgctgaacgaaaagataagttcgatattgaatcaagcattagagaatctatgcgaaaggttactggcgatgatgattggggaaacattcataatgtgaagtgtctgactcttgagcatgcaatggctgcagatagagatggctttgctgagttttttgtccctttggctaaaaatgcagacttaaaggattcagtgctaaacggaaccagtcaagagttacaattcatagttaatctagtcttaccattatttgaagcgattataaaagatgaccatttcgaaatagctagatttgtaaagttaggttctaaaatgttttgtggatcaaatcagaatttaatggattttataattagtgccgatgaacggattgaagagtttaaatcgagactgaaacatgaagacttaagtttgcgtgatgtaattgatgtttttgacaaaagtgagctattagatacccccgaaaagctaaaagtctatcttgaagcagacatacgcaattttactgaaaaagagcaagaagatttggagaaatcctatgttgcatggggaaatgctcttcaagcaaaaatgagggcggttaagagttattcaaactacattagtgaagagtcgagctttgcaactcatcaaggtgtaaagggcctagaatttgagagagtaatggctattctagacgatgaaagtgcaggtggtttcctctttaactatgaaaagttattgggtgcagagccgctaagtgcgaatgacttaaaaaatgaagcggatggtaaagactcagcccctttgagaactagacgattattttacgtgatttgtagtcgcgcggaaaagagcttggcaatagttgcatatactaaaaaccccaaagcagtagaagcgaccgcattgcaatcatggtttaaaaaggacgaagttgttctcatatagtttaattgtgacaatcgctttttcacaattatatcctagagttggaagctccaattattaagaaggcttacaagtgggcaccttggagccttttcatatatgtctagagttgtggattcagatgaactaagtattccttagtaccaaagtgggcgctatactaagagaatcttagctattgaagttagtagctaaggtactcatggaatcaccaacgcctttacgcctaaaagaagcccgcaaagcagctggctacacacaacagcagctaggcattgctttaggtatggagcccaacacggccagcgcaagaatgaaccagtacgaaaaaggtaagcatgcaccagactttactacgatgaagcgtattgctgatgagttgggcgtgcctgtggcttatttttattgtgaagaagatgatttggctgagttgattatcaaatttagccaattagaaaagcccgatagagatgctattattaagcacctagaaaagatacgctcaacggcatagggaaacataaaacttaaattcatattcgttttaaaagttgggattaaaggaaatgagtagtcaggaaaacttattggatagcttatatgctcttcgcgaagatgcatttacacaagatattttgatgcccatatttaaagcgttgggatatacatatgttagttttaatggcgggccatatgaatttggtgtagatcttgtagcggctaaaaaagatgacttatttggtaagtacgagctaacagtaatacagtccaaaaagctaaactctgacaaaggaacaaaagaaaaagttgatattaacaatttactactgcaactaagtcagtgtaaacatcgagaattggaaatacctgaagccggtaggaaaagacctgacaaagtaatattagctacaccagggcaattaaatagccgtttgagggaagagatacagcaagttgcgcaaggccatggggttgatattctggaaggtcctcaaattatcaagctattaatgtctcattgtccacatttgataaagaacctaaacggtattgaatgcattattaccgacaatacaagagctgaacaggggaatgcagctctaaaaaaagctctctttataaacaaaactcaagcattgtcggattatgcttgtgatcttgaattcttttttggttcgcgaaaagaaaattcattgctcctctctaatttggattttctagtaagagatttgacgtttacagaaggaacgttcgagaactttaagtcttttaacgattgtatggaaaaaaagttagggtttagtcttgctgaacaaaaccttgcagcctattacaaagcttatttgaatcaacagcagctttatctatctccagaaaatcaagatttgatgaaagaccttaaaaagagtcagcaggagttagctgaattaatagaagatatatttgatgcaagtaatgatgcttactactcaaaaagaattgattctgagacgcgggatgaaatccaaagtattttaaatcgttccgactttgctaatgcgaataatatgtggagcgttgagatagatgagctgttacggaaatcatcatcgaagaacttaccgcctaaacttagcacactgattgccaaaaagttcaatgaggttacttctactgagcaaaaggctgtcagcaaacctgaaataaaaattaccatatcaaaaaagacaatagaagaaagagtgacgtatcccatttcgcagtataaatctgcgcttgaatcggttaacgaaggtggtgcagatgactttaagattcgagagttacttgttcaagcgaaaaaagttgggttaatacaaaaagttctttttggcaagggcagccctttcactcaggttgcagaaagcagacggcttgccgaaagagaaggtattatttcgatctctccgtcagtagttatcgactctggtgaaaacattgcaatatttggtggtgcagggtttggaaagaccactttgttgcagttgtatgctagcaaatgtgaaatactacaggctaagaagtgtattcttatagaacttgcagaaaacgtaaatatattgaaaaagcaccttaaaaaagatttcagtgatgaagaattagctgaaggattgttaaaagcaattcttgagtataaaggtgtaatttcttctgttgagaatattaatattctaaagacatttcttaatgatagggcacctgtattattagatggacttgatgaagtttatagcgaagtaccagcactcatcaaatcaataaaagcattctcaagtgtttattctcgttttcaaatagtagttacgagtagacccaatatgagctacttagatgagattgaatttataggaattagcttgttaccatttacgaaagaacagttatatcagttctttagatcatggtgttcagatcggaaaatagcggataaattaataagaaaggttgagtcaagtagttcacttcaatctacagttactaatcctttgttagctacaattgtgtgtcatttggctgaaagcgggataaacataccacaaagcgaaagtaaaatttatgaagagcgcattaagttactaacaggtacttatgatcaagctaaaggtattagcagacaacaaaatttacctgataacttaatgttagtggctgaaaagctagcttttcttttccatgtacactcaacgaggcagttggggtttcaacaggctttggctgggttagtaaaggaattgaatcattacctcaataccaaaacactccaatcttgcttgaaagagttaattgagccttgtgatattttacaatttaatactgccacggaagagttaacattcgggcattttaggtttcaagaaagtctagtagcgcagcatttaagaagattaaatcactatcagtttatggagtatttaggcctcgacttttggaaaggagcttttggtttatttgctgagcaaaatgacattaatgctttttttgatatttttgcgcgttcggaggatatgtttaagccaacatactactcgactcttgaggctatgatagatatcaatacgactgaccgtgagaaacgacaaggaatgaagcagcttttagaaatgacagcaatggcagtgaataacattgggttcaatgaaaatattgattacgactactgattttattttttctcttcttttttgactgatgaagcttcgtcagctaaacctaaactaagttttccttagtttaggttttaaatgcaattcctttctcaaacaactccttaccctgatgaaaccattgaaagctacttgcttcgtttgtcacaagacaatggttaccttggttttgctgatatggccgatattttgtgggattggttggttacgcaagatcacgaactggagggggcttttccaaacgagttgcaatcggttgatgtatataaggcatcgcaatcgagtaattttcgggttcgagcgctgcggttggttgcgcagttagcaggggttgaaacgtctgagctgcttaacttgtgttggctccgaagtaatacacagtttggtgctattacggcggtttctcgtggtgggttattggtgcctcgtcagttgcttcgtaagtctggggttcctgtttgcaccgaatgtttaaagcaagatgcgcacataccttacctttggcatttaagagcctataaagcctgtcataagcataatcagcaattaactaggatatgtgggcaatgtgatgctgaaattgattacagagcgcctgaggcgtttttagagtgtgagtgtggtgctgcaatcaagcaaggcccaaaggcaaatcaagcagatttaaaattggcaaatgcccttgcaagtcatgctgctgcaaagctcgttgggcttctggcttggtttagccagtggcaatctatcagctatgatgacgatgagtttagcgagttgtttgtaagctacttttctaactggcccagtgggtttgaggatgaactaagtaataccgctgaacttgctaaagtaaagcagcttagaccgtttaaccacaccgcatttaatgatgtatttggtagcttgcttaaaaatagcaaactggcgtgcgctggctcacacggctataacacggtgcagttggccatcattgcatttttaaccaagcttgttgagcaaaatccaaagaaaaaacacccaaacttaggtgatctactactctctatgctcgatgccgccgtaattcttggcacaagtaccgagcaagtgtttaggttatacgaagagggctttttggcagctgctcagcaacctaaaaagaatacgtttttaaagtctagcgataacgtgttttacctcagacaggttattgaactacaacagtcttttgcaccgaacatgcctaataaccaacaacaatttgtaccaccatggtgatcaatggaactgcacacactacttcaaaataccccaatcaaagagcttacccaaacgctacgagccgtatttgccccatactccgaacatgttgatattacagggagtgaatctcaagcgttggtgattttaattaacctcacctacaagcgaaaagacatcaaagatttagctagtgtgagcagtgccaaagctgcgctacacgatgagcaacaccttaaaacctgtattgatgaagtaaagtggtatcacactcataacttaaagtaccctgatattcgtgtcagccaccaaaggctattggcgcaagtagttgatggtgggcttggggtagtcagcagcgtcagttaccctatgcaatttggctggtcgcatgacagcgctaaaatcaatcatgctaagttgtttttaacaggttttgtgtggcgtggtgaatacgtgtgtttggcacagcagcttgcaaagcaggagagtttttgggtagcgcagtttagagagctagggttgctaaaaagagatgtggttgcagtgtgtgagcaaatagctgcgcagcttcctaatcaagaactgcctgagcaaattagtaattacacccctcagttacttattccaatagagcaagactacttgagtgtatcgcccgttgtaagtcatgcagttttagctgcgctgcaaatggcaacgcgcagcggtttgcttaaacgcgggagcattgagcacaatcgccctgcaaatgtgggagaattgccaagcgcacttggcggcagagtgaacgtgcttaaatacttcgccaaaacttacagcgcgacaaccgttaacgactactacagccaagacgatcaaaggctttttaatgtggcggcattaaatagcaaaacagtgagtgaggctttgctggtgctatcaaagtcaaagcagtttaatacgcttaggcaaaagcgcttggcacgtattgctgcaactaaagcgttacgaacagcactttatggatggttagaaaagctcataaagttggcgcaaaacgaagcgataaataactcagatcctgagccagtaaagcttttatccacgcaagaatttaagcagttagagcttgttttaagccaagagttaaacaggcaaatgagtgggcttaaatacttaaagcgttacgcttatcacccagaactaatgcctatcttaaaagcgcaacttagctatgtgctatcgcatcaaaataatcaagaagatgaatttgaggcggagcatattcagtacgtgcattgtcagaatttacgcgtctataacgccgaggcaatgccgaatccttacctaatgggtatgccgtcaatcaccgcacttgagggtttggggcatcaatttcaacgtaagctgcaaaagttgctgggcggtggcgtacatgtgattggtgtggccgcgtatgttcgctcgtaccaattgcacaacaacaagcagttaccagagcccaacaaactcaaaaaggatggtcaaaagcgtgtgccgctgcgctcggcaattatgcaaatacctaagtgcgacatatgttttgatttggtgtttagggtgcaaactgataatcaagctgttgctcacgacttgtctgaaaatctacacaaagcagcatttccatcgcgctatgcgggtggcacgctgcatccgccatcgctatatgatcaagttgattggtgccaagtttatgcaaaaccactggcattgtttgagcgcatccgctcgttacctaaaggtggttcgtggctttatccaacctcggtcgaggtaagcagttttgaggaactggctgaggagttaacgctgcggcccactttgcggccagctgcattgggttacttagcccttgaagaaccaaagccaaggcaaggctcaatcactcagttacattgctatgttgagcctgttattgggatgcttgaatgtgtagatgcggtcacggttcggctctctggcgctcggcattttttaaatcacgggttttgggccatgcattgcaaaaaagcatctatgcttatgaaaaaagccaagtttgagtacgactaatgaaactcccgcgccagctctcatacacccgctcgctctcgccaggtaaggctgtgtttttttataaaacacccgaaagtgattttgaaccactacaaattgaacggcaaaagatccgtggtcaaaagtcagggttcgccgaagcatataaaaatgaagccactcctaaagagctagcaccgcaagacttagcctttggtaatccccacaccatagagttttgttatgtgccgcccaccgtgcaacatctgtattgccggttttcactcagagtagaagcaaatagcctagaaccgaatgtatgtggtgaaccaaaggtaagttactggctaacgcggtttatgaacacctacaagcaacatggtggctttggggagttggcaaagcgctacgccaagaacattctaatgtgtgggtggctatggcgaaacaaaacatcacccaatgtagatttagagataattggcgaagggtttgaacctatcagcatcagcaaagccaaccgtttgcgctgggatggcaaatggcacgaggctaaagacgcgttgcatacactcacagaagtgatccaaacagggctagaagacccatatagcttttgctttttagaaataacctcgaagctcgaaacctactttgggcaggagatttatccaagccaatcattcgcagaaaacgacgacgtagcaagaacttacgcttacacccaagtagcgggtaaagacgcagcctgctttcactcacaaaaggtgggagctgctattcaaatgattgatgattggtatgatgaagatgcaagcaagcggttaagaattcacgaatatggcgcagattataaaaacgtgatagctagacgcagaccgagcaaccgattagacttttactcactgctaaaaaaagtggcgctatatgtaaaagaaatggagcaaaacggcctcaaaaaccaagagcaggccagacatattcactatatagcagcagttttaatcaaaggcgggctattccaaaggactaaagaatgagccgagattattttaccatcacttacttaccagcaaattgtgatgtaaccctattagctggccgctgcatcggcattttgcacggctttatgagtaaacgaagtagtaatcatgttggtgtaagcttcccaaaatggactgacaaacacctaggaaaccagatagcttttgtgagtgaagataaagctacacttaaaagcctaagccagcaaaactacttccaaatgatggcccacgataaactgtttgaaatctctgctatcaagcttgtaccaactgatgcgacggaagttcgtatcattcgcgaccaaagtctaggtaagttgttcatgggtgaaaagcgccgccgaatggaacgcgcaaaacgcagagccaaagctcgcggtgaagaatacatcccccagtacttgccgaccgacacagaaattagcgcatttcatagaatccccatcgccagcaaaagcaaccacaatgaatttgtacttcatctaaggttagagccaacaaattcaatacaaagcacatataacagctatggctttgcaacaaatgaagagcacaaaggcagtgttccactgctagccttttaaatatcggtagtgtatggagtgctgtatatcaaagagttaagtgcaaatggtaaaacaaagtttatttgctgaaagtaggtttaatcgtatggaatttatagagttttaagctaactttaatagtgacctgccgaataggcagctggaaattacacactcgcacacgcgaaaaactccatttagtgccctgccgaataggcagttgaaattaggccaggaagaaaacagccacatcgtatgacatattactgccgaaaaggcagaggacaattcaaaagcccctgaatttactggggctttttgattcacacaaacaaaaaaatgtgtatgctttttaacatagttgctaaacattattttgtatttatataaaaagaacaaaggacggcatatacaagtggccaatttaaaaacaaatgttttagattctgctgctcaaggtagctttattgaaaaaatcttagaactcactgagcgtggtttagataccgaacctgttgttgaagtactaatacaattacaccaaagttcgcaacttgatgtattcaaaatgttttcttctagcaatgttatcgataatcaagacaaatatgtttttcttgatctattctccaaatttctacccgagattgaaattgaagtcatcgaagttatcagttacttgaataagttaagttcaaataatttagcgtcccctagtctaattgaatctttcatggagttctgcgcaaaagatgaaataagagttatcaaaagtctcgagtattcaatagaaaacagtgattcaatatctcagtttatttcatattcactgttagcaggttccaaaatacacttccaaaagtatttctcaaaagcgttatcactttcggctagtggtactttatgtgttagggctgaagcaatacacaccttgggtaggatcaactattcaaatcgacttgatgacacttataccgcgtttatgcacatctctaaaatagtttcgtctgaaaccacagcagagctttatgtctcagcactggactcacttatatggttaaagagagcaaatgagtcattgttcattgatgattgtgtggagaaaattatcacgctaaaagatgatagggttttatttgaagtgtcgaaagttgttatgtttaatgagggagttgtttcagaagaaacatataaaaggttactcggttgtctaaattttgtaaaccctaaacacaaaacgagcattagcaatttctctcatggactgagaaaacaaattcaaaatggagctattgatgattcattagcgtgtattgaatcatttttaatagcaaacttgaggcatgtcaccctaaatgactttggttctgtagtgcatgaaataacaaaaccagagaacgattatctaaatttcacagtaactaaatggttaatgtctaaaaaagttgctttgcattcagctgttcaagatttatttaatcacattcatggagaggaaagctacttacatgcagatgagatgcttttaaatagtgatactggcattaaaatgtatacggctagaaaggctattgggtggctatttcaaatacccgtcacagctacaagctttttagtttctttactcgaaacggcaacagataaggaagcggaacagttagaaggtttgatatacgagcctttattgattaactatccgggtaaagtaaaaaggtacttagagtcattgaaagacgacgaacgtactcagattacgaactcagtacatagaattttagattgtctagcggtttatgacgagggcctggagtcagcttggaatacaaaagaattgtgttgtccgcagtcacattacgaaacttggtataaaaatttcgatcatcagtcagagagagcgtataaggaaaacaacaaaggggggctttcagatctgtttcatagtgtaacattgctctatggaaatggttctattcatcaaatttaccatggagatggggagcgtaaaagagcagagttacagctccaatcaattgagtatcgtcatgaattcccaaggcagcaagcattagacccatatggtctagaacttcaactctggcagtttaggtccgaaggagttgggcaatgaaattaataataagccaatacttagcttctttgaaagaacgtgatgagttagatgtaatattgcctgatttgttaagtgagctaggtctgacagttttttctcgtcctgggagagggacaactcaggatggagtcgatgttgcagctacaggctcattagatggtaaaaaggaaaaggtatacctactttctatcaagtctggagatcttacccgcagtacttggaatagtgattcgcatcaagcacttcgcccttcgctagaagagattttggactcttacattcctaatcgtctgccagtacaacaccgaaataaagatatagtgatttgcttgtgttttggtggctctattaatgaacaagtaaggcctaaagttgaaggctttattgagcgaaatagtaaaggaaaagtacgttttgaagagtggaacggggattttattgcagatctaattttgaaaggttttttgcgagaagatttgcttcctaatgaatgtcgagcaatgttaagaaaggctttggcacttatagacgaaccagaatattcataccggcactattcagacctaattctttggtttaaccataaagagatgaaagatgagaaatctcaactgatgcagttgaggcagcttcatatatgtctctggattctttttgcttggtgccgagattataataatttagaaccagcctacttagctgctgaattaactttgttaaatatatgggaaataaagaagctacactcaaaatcgcagacaaaagttgctaaagagatagcaatttcattttcttcatttctccatacatataatataatcacgaatgaatttcttgaaaagtgtgtcaacccccacgttggaaaaaagcattcaatctcaaatgcagtacgaggcaattgtaaattcgatgtgagcctgaggctatttgatattttgagtcgtttgagtgttaaaggtatatggttgtcaaatgaaataaggaatcaaccaagcgaagatgatagaaaaacagaagagttgatttccagccttcatcaaacctttgaagccattaaacaactaattgtaaataaccctgtattaatggctcctatcaaagatgatcaagcaattgatttatctatagcaatttattgtttattactagatgaagagaactttcaattcatcaaatactggcttggtgaaatggtttatattttgcgccattcttattggagtgggagagcgtttcctgcagtcaatcttgactatgcacaattgataaacgtcgaagaaagtaagactaaagagcagcttgaggaacttacgcgtagtagtatttcatatccgctaattggagtgatagcgtcattactagaaatgaatgaaataagagaagtgctgtccgacttttgtgaaaactcattaaagcattgtgaaatgcagtattggtatcctttagctgatacagagaagtttttatacaccaataaaggaaggcatggtggagtccttcatcctatagatcttgtaagcaaggatgaattacttttagaacaggtattctctgaatgtgagaatacagattactttggaaatttgacggcagtttcagaagggctcgaaccactagtggcggttgcttgcaggcactatcgctatcctttacctatgcactttttcttggatgattatgagttgtttaagcacagagctagtgttagaaattaaatttgttaaatacttggctattggagaataaatgcgccttactgatcgaaaaacgattcaagactggaaaaagttaaaaccacttttggttcagtcagatgaccaattgttgtggcggaaagtttatattgattactttatagcaagaataaatagcagatatttagagccaatcaagagccttagagaaagggatagttatcttggatacgggtttacaatagtaacagtcctttgttctttagtggaatttttagagtcaacgcgcaagggacaaaggtataagtactgcaaggatagagacttaggcttaaatgaatacaacaagagtggagagtgtttcatagattttctaacgactcaactcccatttaaagatcaatttagtcaagatattgctaaagacttttatagctcagttcgttgtggtcttttgcatgaagcctcgactaaaggggggtggcgtatttggggtaagtctgacacaggaaaagatataatatgctataagaccaaaaaacttttcagagatgattttgaatgggctattagagagtatataaccgcatatggagatagtctcgctgaaagcagggagttacaggaagcattcattagaaaatttgattggctatgtgagtaagtaatgcactaaccttcaaatgaatgctggaatgtttactaaaagccttaatgacagggtaggccctaaacttatttaaatcactatgcagatttgaagacgtttataactagagagattccaagctatcaattatgtatacaaacttttttcaaatgaactagatagtaatttctttaagagattaaactcaataaaaaggatttttaatggcgattaaagctgcaactgtattatttataaagcttggttcaaaaggtgattacgagagtgagtgtattgaaaaagaaggcacaataaagttggattacaggcaaattcctcatgagctatgtctaagtaacaactgggatcaagttagtgagattgttgctcaggaatacaatacaaaccaaggttcgacaacaagccatcgaaatcagattaaaaagttttatacagagcctaaaacaacaatgtggattacattttacgactgcaaattgtggtactgctttgctgaagaagaagtcttgcttgatgacagtagtaaaacaaagtcacgtaaaacagttgatggttggcgctgtgtagataataaaaataatgttcttttcatacaagctctaagcggcaagttgactaaagtacaaggcttcagaggtacaatttgtgatgttaaagaaaaagagtatctgcttaataaaatcaataatactcaacatcctgatattgaaaatgtagagaagaatttagtatcacttaagctttcacttgaaaagattatccaactattgtcgccgcaagattttgaagtgtttgtcgatctgatatttcgttcatcggggtggtcaagagtcggtgctgcgggtaatacaataaaaacgctagatatagaactcttggcaccagttacaggagagcgtgccattgtacaggtgaaatcacagagtaatctaagtctatataaagagtatgaagagcgattaaatgtagaaggttatgatagagctttttatgtaacccacactccagatagaaagctaagcgaacatattgatataatggataaaaataattcaattcaggtgtgggatgctaaaagactagctgatttatcagtaaatgcaggattaattgaatggcttgtgagtgcagttgggtaatgatttgtttacttaatggatgttaaatgaaaaatgaagcaatgaaagtatttaataaagctaatgacctattaagagaatctccactctcaaggctcgagcgatacaaattacttatttcattaatcacctatcatcatatttcctatcatcaatactgtattgaaaacggattttatgactctagtgtgccttacagtttacctgagcactgctacttcaataatttagtaaactcagatggatacagtttaaaagaacgattaatcagtaaccttgtagcaattgaggctgagaatgactttttgaacggtatatttccaatctctttacttcagcatttagatagttattacctaaatgagttaataatgtatattaattattcatatgacaggctaataagtgattgtgatacacaaataggtacttttttacaagaatggcttaatcctagagtaggtaactttggttctgatttgccagctcgagtagccgaattaatgctgctgctcttagatttaaagaaagatgaggatatatatgacccctcatttagtgttggcaggatgttaattaaccctaaaagccttgatggtactttgagtgagtatcaaggttttatttacggcgagacaaaacagctcgatgagttttggtttgctagagtcctcatgattctgaataataactttagtgttgatgtgaggctaggtgatgcattactaaaaccacagtttatagattcaagctcatacgagcctagaacatttaagaaggtggtttcctttcctccaattaatcagaagtttatgaattatgaagagtggggttacctgggaggggaaaaaactgcttttggaatgccccctaagagcaacgctaactatgcttggttattacatcaattggctgcactggcccctgaaggtaaattagttacgcttgtttcatctcagatgctggtgactaatcgggccgagttagatataagaagagctcttatatcagaagacttaatcgaagctgtaatttctttaccaccaaaaatattgaaatcaagttcagttgatctttgtattttagtaattaacaaaaataaaagtgagaagttaaaaacgctattcattgatgctaaacacgattatctgaaatcgagaagctctaatgatttaacacatgaacacaccaaaaatatagttcaaacttacagtgcacttcaaagcactggtacttattccaaggttgttagtttagatgatataaaagccaataattactcattgtctgttaaggagtatgttgataactcaccgaatagaaaagtaattgaaagattaaagaataaccataaaaattttaaagaatattcatttgatagctctttagagttagatgaacgagctgttctgtctatgcggaggataaaagctggatctgaagcaaaagctaattctgtatttatttctttagtgcagagtcgtaaccgtgttctaacaagtttagacgatctaacacctcaacagcaaaagcattacattgaagttcaatttaatgaaaatattatactttgccgttatgcgaagttgtatttagattcagaattaggcaggttatcactggagcacctttctacaggtgttttttctagattgtctattaaagatttacataaactaaatatttatgtgccggaaaaatcagagcaactaaaagtactagagttagcgaataaattagaagctgcagaatctacgctaacccgttacaagagtgatctaatcactaacccatcctcagcttctgaaatagaaaatcaaacaaatagaattatttttgatttatctgaaattagcgatattgagcgtgttaaaattctagtagagattaatgaaactaaagaaattgagtttaaacagtttttctttctcaaagagcaagatgtttataacccatctggaaaagttttacgtagcgaagaagagcaggctaaggtaattaaaaatatagcttcattccttaatactgatggtggcacattattgttaggtgtgagtgacagaggaaagttggttggaatagatagagaaatgtcagttttgaatttacagaaaattgaaaagtatctaaaagatttagaaagcaaagtgacaaatttgctaggtgattcaattagcaaattggttcgcctatcttcagttatcatagatgctaaaaatattgttatcgtagattgtacagcttcccctgagcctgttttcatgaaaggtgagaataataagtatcaagatttttatataagacgctcatcagaatcagaagcgttatatggctacgatctactgaaatatatagaaatgcatttttaagagccagcaattaaattaagtaatttatctattttagctgctttactcattctgtttttagggtaggtatcgtcgctttttgcattctttcacttcacttttatgccaagttacacttcaatcatacagctaagtcattgaaggaatcgggtcgctttatgcaaacttttgctacaaactccactttgggtgactttcttcatacttatctgttttttaaacacgctttcgatacccgctttaattttctattaaattacaccgatttattagctggtatgaatgatgtcttctttcttacaatttactttagaacctagaacctagaacctaggctcttaaaactatttcacaaacactctaaatccccacgccggaattgtgagttctgttgtttcagtaaattctattagctgttttgaaaaagcatcagtgtacttacctaagtataatggctcctcaaaactgactgtttttggttctttcgagaaattaaatacggcaaatactttatcgttgccttttgcacgaacaaagctaagtactgtttttggtgcagtgtttggtacatgtaccatgcgtccaccaaattggccattccatagtgcttcattattatgtttgagttcaaacagtgactgatacaagtcaccaatagggtgcttttgccattttatagggtcacgttcgaaaaattcgagtcgtttatcgttgcctgcttcttggccgttgtaaatcatcgggaagccttcgccaactacagacagcgcaatgacagatccaagcgcctcaccgtaatgttcatacatggtaccttcccaagcattggtgtcatggttggcaacacctacaaggcggtaagcttcagctgggaatgcgctttcattccatgaataataaataaatagggcgctgacatctgcatgaccatttacaattttgcgcatgtgttcagaccatgaccaagcgtatgtcatgtcaaaggcttcggcatgtaaatcgcgcgattcccattcagcaagcattaaaacaggctttatgtcatcaagctcacggcgtacattgttccaaaagtctacgggtacaaagcctgctacatcacaacgatagccatcaataccgacttcttttacccagtatttcatcgactctgtcatgtactcacgaagcgctggttttgaataatcaaagtcgataatgtcagaccaatcccaccaaggcgtcggtctaaattggccttgatagtctctatcgtaccaatcggggtgttcatatctaagccagttatcccatgcgctgtggtttgctacccaatctaaaataacgtacatgcccatgtcatgtgctttattcacaaaggctttaagatcatctagtgtgccaaattcagggtttacttttcggtagtcttttactgagtaggggctgcctaaactgcctttgcgattttcttcaccaatagggtgaattggcattaaccaaataacatcgacacctaatttctttaagcgcggcagttgttgctgtgcggcattaaaagtgccttctttagtaaactggcgagtatttagctgatacatcactgcattttttgaccatgccggatgcgttatctttacatagggttttggttggtaagcactatttgttgtttgagtacacgccgaagcgagtaaacaaactatgaatataagtaagcacttttttgtaatatgagtcattttaaggccttgttgtctagttttatatgctgattgaaaaatcagcaggtgtccttactatagccttcgcgtttagctgcaacaataaagtgcatacgtattcactttgtgtttacataatcgattaagtttattcttgctattcgctgagaataagcaactaataaagtacttaaatgattaaataaatgtgttgaacaaaagccactgctaacaaccaaatagtcagtgacttggtccgcttttaagcggatagttgaaaagttgatttgctgggatcccagctaatgagccggttgatttcaagctcttttaaaacggttagcaattcggactcacttaaacaacagccttgttttagcttatcaagtgaaatcgctttgtcacggctatgaaacttagaggccaacataatacggtatattagtttagacttacggttcataacgcacccctccacattttaattttgatagcagcggttgctactaattggttttataattaggttcaatgtgtaccgatgattaatgactatgggcgatctttttttgtaagtcaatcgttatataaaggttaaataagtgttttggagtgggctgttcatttgtcattttttgaaaatctatagcttattgaaatagcaaaataagctgtgaattttgatgaaaactttaatctaagccttcactttggttaatttcgagtacatcattaatcgtgttaaacagcaggtgtttttcaataggcttaccaacgtgaccgttaaagccgcagttcatatactcgataatattttctttcattacattggcagtaagagcgataataggaactgcttcgttaactcttcgtatatgagcacacgcttcaatgccccccatatttggcatttgaatgtccataagtactagcctaggattgagcttattaaataactctatagcttgtttaccatcttgtgcgaagtgtagttcagcattggtttctcctagcattgatttaataatcatggtgtttaaagggttatcctctgctattaacaccgtctgatttgttaagtcaggtactttaatgtgagtaattgtttcatcaatatgagctttttgagatagcttaagtggtaaatacactgtaaaacgggtgcccttaccaagttcactttttacatcaatactaccacccatgcggtttattaaattaactgtaatcgacatgccaagacctgtacctccaaagcgcctggtaatgctgttatcggcttgctgaaatcgattgaaaagatgagacagtccttctttgctcatgccaatacccgtgtcgataacatctaattctattccctcgcgctgagcagcttttttgacaataacttttacacctccttgttcagtgaatttaactgcattagatactaggtttaacagtatttgtcttatgcgtaccggatcgccaacccataaatcctctatatcatcactaacttcaatttttaaatagatagatttttcattacagacaggcaaaaagtcagaattaattgactcaacgacccgcgagagagagaagtctattcgttcaactgatagctcgttcgcctccattttagaaaagtctaaaatatcgttgatgatggtaagtagtgatcgacaagaaaacagcgccttagcaacaacttctatattgttcggtttttgaatgtttggctgcaagatttgtaatagccccataataccgtttaaaggggtgcggatttcatgactcatgttagctaaaaactctgattttattcgtgtgccttctaaagcacgctcggtgagttcaatctgttgtttataagagtttgaaagctttctaaagtaaacaagcaatatgctggtaagcaagatgatggttaaaatgtgtacgatgtaagcgagttgaaagttgttattgatagcaaggcttttgtccttcagtatcgtacttatgtatgtttcgaattctgaaagagcctttaaggccgcagcatcatccactttagccactaaatcgatttgctcacttgtagcgccttcagcaatcatttttattgcaatgttgagtttagcttcatactcactaactgtttttgtaacgtcagcaagcgctgtttgatcgtattcttctattgcgctgagtttggatagtaagtcttttattgcggcaagttcatttttaattttgggaaggtaaagctcagtgttttttcttagcaccaagtttttaaaatgatgaataaaaccaccataacctagtttttgaataagcttgtcgtgaaggacataaacatttgcagctgtttcagaataatcatgccattgcgagtcgacatttttataagagaataaagaagtaaaagtaagcaatatgactaatgcaatcacgatagatgcattcatttttaacttttttttagtttgcagcagcgcttttgtcattagattaaggcatctatcccattattattttaagcatagcagcattttttttgttcacataagaatggactaaagtcagaatggctttttatgtgaataataaaaagccttaacgaataacatgaaataacctaaagcgattaataagctattcataaaaaatattttaaatcaatagcactgtacttttttcgtacttgttgtatcttaagttggtacgggattttaaggtttaattgagtgtaagctaacactcatttgttaagtggagtaaaggatatgcaagcgcaaacagtcaaagaatcaatggcaactattcaatcaggtgttgcaaaagcagatgggaagcttttagttacagagcaagacattgtttttgagccatttaacaaagagttaggcctaggtccatacacattttcacgagcgcaaatcaataacattgataagtgttcaggtaaaggcgcgggtattttaccaattacagctgatggaattcgtattacgttaaataaccatgatgtatttgagtttattttagcaaaccctgatgagtggctaagcgtactttctcactaagtaaatagccaataggcggcatattaattgacgtattactatgccgtttttttacgcaatgaattctctttctgcgcaactacttgatctcaaacaatactaagataaacctcttaggctactttacacatctaaactattaaattgctcgttgcttattaaaggaggctcttgagcaaatgatcaacttagatgaacaacgcctagtttcgctcgaacgcggttttcatattccacctaaacctgaattattgagccaaattgctgatgaaatgcaaaagtcggatgcaagtttagataaaatagccctactaatttcaaaagacattagcctttcggccttattgttaaaaactataaacagcccggtgtttggcttgcaacgcactataagtgatatacgccaagccgcgatgtttttaggcttagagcagcttaatcggttggtaacgctggctttacttaagcaaaattttaaaggcaatgcctgcataagcctagagcgcttctgggatgagtcgcttgaagttgctaatgcttgtgtgctgctcggtaatagttataagtcattaatgccagtagatgagctttattctttagggctttttcataatgtgggtattgccgcaatggcattaaaatttacagattatgtcgaggtacttaaacaagcaaatctagctaaagagcatgcgattacagaccttgaacaagcacgctaccagtgtgaccacgcggtgattggttactttatctctgtttcttggcatttacctaagccactttgtcacgttattttaaaccatcataacacgcactttttagcgcaaaataatgatgaacaacaacgtatggcctatgccattttaaaatgtgcagaaagtgctgtggattatgcccgtcaccaacagtattcaagcgaatggtttaaaatcaaagaggcgtgttttactgagcttggtattgttgagcaagattttgctgatatggtcgaagattacgtcgacaatgcgatggcaagttaaagccatttagttttatttcctcttatcttaacttcgatgagtttgcgagtggtgagttttcatcactcttttttaaataggcagaaactattcaatattaaattttctgttgttagctgagttttatttttccaaagagtgcttaacatttcatgtgcttgtaatagacactagcagcgtttgttttatagacgtttattgcccattcccattgattcttagttttgttcttgaataaaaaattccccaaaacaaacacgagaatgtaattcttcaattcttaaaaaacacctattttataaagcattaatgtaagctaatgattttaagtattttttaatctcaaggttgcttgcggtgtgttttttttgtctcttttttggaatttaatattgttaatatataaaatctaaagaataaaatatcttgattttataaaatattactactattgtagccgcaatgtaacaataaagttgttaccaattgttgttcaaaagagcatttatgtagtttgtagtcacaaaatctctcactttttaaaaaacgatagggttacatttccatgaataaaaaattctccacgctaactgtttgcatcaaaaaagcattgctcccaactcttttacttggaacatgtgcaccagcctttgcagctgatcaacaagatgaaaaaaagaaagttacaaaagaagatattgagctgatagaagtccgcggctatgcggcgtcagttgagaaaagtattaatatgaaacgcttttcaaacagcgtagttgatgcagtttctgctgaagatatcggtaaatttcctgatcaaacagttgcagatgcattgcaacgaattcctggcgtgcaagtagagaaagacttaggtggtgaaagcgaccgagtgagtattcgtggtacagcacctcatttaaatataacgctgttaaatggccaaaatgtggcttctgcaacggcttcggcatcaattacacgcccgtcgcgtggttttaattattcattattaccagcagaaatggtcgatactctcgaggtttataagtctgctgaagctgacattgatgaggggtcaattggtggcactgttgtagtaaaaacacgtaaaccgcttgatagtgaagctaactatgcagcgctttcagtaaaagcattccactttgaaaacgcagatgaaactaagccatacgtgtctggtttatattcatggaaaaatgaagcccaagattttggttttaatgttggcttcgtgcacaaagaaacagcaacgcagcgtgatagtaaagaagtacgttttggataccgcagcacagatgctaaccaagatggtaatgcagaattttatcctggggcagtgggttacaaccgctatgcaagtgatagcgatttagataccgcaacagcgacattccaatacgctgcaaatgataaccttgattttgttttcaataacttatattcaaagtcagaacatgaatcatatggcacgtattcaagcggttttatcctgcaaaatattgctaacattgagaaccccgttatcgttgacggtacggttgtcgccggtgatttaccagcacacaataacttgggttattatggtaatgcgggctaccgtggtgaatttaagactcaagctcatgatttaaaagtgacttacaaagcagatgattacactgttacaggtcagctaggttacagtaaagctgacggtgaggtgagtgatgtttattcagagtactatgccaatacaaatgcgtcatttacgttagaaaatggtacgccagatgtgactttatcagcagacttaagcccacaagattaccgtttagattacaaccataaaaatgacatactcaatgactctgatgagctttatgcgcagtttgatgttgaatatttactagacactggttttttcactgcaattaaagcgggtgtaaaataccgtgagcatacaaaagctgccagtttgatgaaagctaactatccaaaagtgtcagcagcaggtgagagctttaatttgggtatgtttgcaagcgattctactagcgacggcattttatggcagtttgataataaccagtatgcagactggatctcgtctacgagcccaacatcaggtccttatgagcaccttgactacaccttcgatcttgaagaaaccgttacagctggctacgtcaaagccgtgttcgagcacaataagtggcgcggtaatatgggcgtacgcgcggttaaaacagagcttgactctcgttcagttgagtacactggacgtagttttgcgcctgaaaatattcaagatgtatatagttcaaatagctacgatgacttcttaccaagtgtaaacattaattatgactttacggatgatgttgtgcttcgctttgctgcggctaaagtaatgtctcgccctgattacgattttttatcagcgcgtaaaagtggctactgtgcagcggcaacaggctgtaaaggttcacaaggtaatccagacttaaaaccttatcgttcgactcaatatgatttatcagctgagtggtactttaatgagtcatcaatattgtcattagcttatttctacaaagatattgattcgtatatcaccaatacaacgattgaaaagcagtggacatggacagaccctgataccggcgttgaagaggttcgtgatttcttagtgactcagcctcaaaatggcctaggcggtgagaattcgggctttgaagtgaactacactcaaaagcttatgtatggttttggtattcaaaccaactatacatattcagatgctgaactagagcaaacaccggagcaaaaagccgcaggtgaagaagctgtgttgccaaacaactcagaagatacttttaatgcgacggtttattatgaaaacactgctttcagtgcccgtgtttcttatacatatcgttcagaatatttttatactaattaccttggcttaaaccagtataaggatggttttggtcaatatgatttaaatgttagctataacatttctgaagattttaatcttattttccaagctattaacttaacaaatgaagagcaaaaagcgacttcaggtaatagcacaggtatgccagatgctaatcgtccattagcaattcatgattatggtcgtcgcttcttgattggcgcacaaatgaagttctaatactcatttgagtttagtgaaattgaaggcacagcaacatgattgctgtgccttttttatgaggttgatcatgtatttaaaaattttatcgttattgagcatgtgcttggttttaagtgcgtgtagtttattctcaaaaaatgaaacaacgtatactgaaaaacaactgcttggtacgatttaccaaccacaggtcgcaagggagtttcgtgctgcttgggttgccacagtagcaaacattaactggccaactgagcctgggttagctgttacagagcaaaaacggcaagcgattcaaatactcgataaattacaaaagcataactttaatactgtgatttttcaggtacgcccgcaagcagatagcttctatcacagtagtcgtgagccttggtcttattatttaactggcgagcagggcagagctccagcaccattttatgacccgctacagttttggattgagcaagcacataagcgtggcttaaagatacatgcgtggttcaacccttatcgagcccaccatcctgatggtggccctgtgtctgaacactctgtggtcacacgtatgccagaacaagtggtaaaactaaaaaatagtacttattggtttttaccaaccgatcaagatgtggttgctcacaccttaaatacattaacggaacttgttaaaaattacgatttagatggtattcactacgatgactacttttatccttacccttcttataatgaaggcgaagatttccctgacgcattacaatatcaggcttatgtaaaagcgggcggcaagttaacagttgcagattggcgtagagaagcggtcaatcaatttgttaaacgtctttatgttcgtgttaaagaaactaaaccccatgtgttagttggcattagcccatttggtatctacagacccaataatccagactcaattcgtggcatggatcagtacgagaagctctatgcggatgctaagttatggctaaacgaggggtggcttgattacttaactccacaattgtactggccaataaaccagtacgcgcaaagttatccactgctggtaaattggtggcaaacacaaaacaccaaacaacgtcatttatggccgggtattaacgcacttcggtcgtttgatacagcgggtgtcgatgaagtggttaatcagatcatgattaaccgaggatttttagcatcgccagggactgttttttggaatgttgcggcgcttgacggtagtcgattaatgagtgatgcattagcaaaaggcgtgtttcagcatcaagcattaataccgcaaaccccttggatagacatgccagcggttgagccatttaaagtttcatatgaacgttcagcaaatcacattgagctatcttggcagcatgcaaatgaaccacaagtaacgcagagcttggtgtattttaaatacggtgacgattggcattatcagctttatgcaaacaataaacatacgctcaatgttgctacagaaaaagagcaacaaacattaacaacaattaaagtaatagccgttgacagattaggtaatcaaagtgatgcagttcaattagaattttagttgaggctgtactgcgtgtcccctaatttgttacgctttaaaaaactaaaaaatggatactaaagtgaaagcagttttgttaagtgcaatcgtactgattggtagctcttattcatcatgggctactgccgcaacaaagcatatcaaaatagtaaaacctgtggttgcagcgtttaaagcaggggataaagcggcgattgcagaacgagtccactatccattgcagcgtaaagcccctcttaaagacattgagaataagcaaatgcttatcgataaatttgagcaggtatttgatcagcaatttgttgaatcgatagctaactcaaatattcgtcatgattgggagatgatgggttggcgcggcattatgtttgattcaggcaaactttggttagactttgatggctctatttgggctgtgccctatcaatcagatgcagaaaaaacattacgcgaagcgcttattgaagagcaaaaacaagctttacacgaaacccttcgcgaatttactcagccgatactaacttggaagacaaaaaagcatttaattcgtattgatgagttggcagaaaatcaataccgctatgcggcttgggatattgaacaatcaatgctggatgagccaagattggtgataacagggggcacgttaagctttgatggtagtggcggtaaccatttttatacatttatgaataacggctatcgctatgtgtgtcatgttatcgtgctaggtactgaacaatctccgacagggcaattagaagtatttaaaaataatgtacagattttgtctgagcctgctttgggtttttaggtgtttttgcttactttgaactacacttacttttttaaaggagtaagttatgagtacaaaattttggattttaagagccactagagttttcacgctggtggctattttattgtttatggtagaaatccttaaaggtcacgacacacaaagtgcattgagttttgcattactttggtcatttattgcaacggcaatttttatcgcaacccgtttatatcactcatcaaaagcgcgacattgtgcactttgtaatgacaccccggatgataaaaaagccagttaacttaggttgtaaacaaatacaccgccccatactagcgcacaaattgtaagagcaataagtacggctgctgaccccaagtctttagctaggcctgataacggatgaatttcaaggcctatgcggtctattgctgcttcaattgccgtattgaccacttcagcaaacatcacaaatagcacagatacaagcagcatgattttctcatacagggtaatttgccagataaaaaccacggctatggcaaggaccaatagtatcagctcttgtttaaaagcagattcatgttttgctaaccacgtgaatgcacgttgggaatttttaaatgcaaggcgaatacgtttaatgcctatgggtttgttagtgctatcaaattgcatagtatgaaatctctatttcgttagctttgttttgagcaagcataaaaaatgtcttgctcaggattatatttagtacttccgacatgggttaagccaagtagggtgtcaaaaatgttatcgtgtgaaaaagcatggttacgctgttgttcaatacattggttaaagcggctatcggctagcttattactccaaaacagcataggcacttgagtttgctcttttggcgctaatgcatatggaaaaccgtgtaaatacaaacctttttcacctaacgactcaccatgatcagagacatatagcagtgatttatcatccgctttactgtctttaagcaagttgattagtttactcagcactaagtcggtataagcaatggtattgtcataggtgtttgtgagttgctcgctgctacaattttggatatcgctacgtgggcagtcaggcaaaaatttagtgtctttttttgggtagcggcgatagtaggttggcccatgtgaaccaatcatatgtaacaccactagttggtgctttgcattactcttggcaagtgttgctgctaactcatcaacgagtacctcatcaaaacagtaatggccatcacaaagtggattgctctttgtcggttctatcgtttgtgatttaacacgtacacaaacccctttgcagctgctgttattatcaatccatgttacttcaactccacttcgttgaatgatatcaagcgcattctcttggctttgtgctatacgtgaatcatagctgttgcggtctaatcgagagaacatgcaaggtacagaaattgcagttgctgtaccgcatgaactaacattactgaaatattttaccccaagcttaggtgtattttgattggttggtttttcataaccttgcagtgaaaaattggtagctcgtgctgtttcgcctactaccataatggtgagtgagctttgctgcttagccaataaatgcggtgttttatctaatactttgaatggtaaaggaggataaaaataattatcgcgcaagtacttataacctgcagtgtaaaatgcaaaaggagttatgtagctcgttaattggcggttattacgccctacagaggcataatctttataaaatggtaccgcaataatggctacaacgataacagctgcaaggtttaatagcgcaaagctttttaggcgttcgcgaaagtggccaacaatcttaaagcgagaaaataaataggctggcagcaccccaagcacaccaataaaagcgataacttgtacattcaggtatgaaaatgcctcacctgaatttgtttctaagacattttgcaacatgcttttatcgaagatcacgccatagttcaaagtggcataaaacagcaatgacgagagcaccacgcttgtcaaaagtatgggctttacaaaggtgattaacgacagccaacttagcaccattgccgtcaatgccaataagaaaaacggcacggttattatgaataaccagtcgacatgcccaggcttggctgccgcctcaaacacgttatataaaaataagccgttaaaagcgataactaaatataaagacactagccagacaaattggctgtagctaacgggccattttttagtaaaaagttgtttgatttgcatactcatagtcattcctcatcgctatgatttattcggtaagcgatacagcttttcggtataagcaagattgctaaataagacatgagccagcgcttttttggcaagatttaagtcagtggtgggtttatcaatggcaacttggcttttattggttgtgtcataacgccaataactcactttttggtttggcattagtattaccgcctcaccattttctacataagcaaagttgtcgtaatactgcatcatggcgcgctcaacagggtattgtttagttaagtcatagccaagcatgggagttgcttgcccaacacctaataaagacaacaaagtagcaggtaagtctatttggctgactaagcgagtatcgcgctttgctttcacatcactgtttaggatcacagcagggatatggaaggatttaagcggtacaggctctgagccaaacacccgtacatcatgatcagcaaccactaaaaataccgtgtcttgccagtaattttgcgtttttgcctttgcgatgaatttacctagtgcataatcagcgtatttaattgctaggtcgcgtttgtagttttctgggtcgtggccatcaggtagcgttactttaccttctggtatatcgaatgggtcgtggttacttgacgtaaacacaaggctgaaaaaaggcttgcccgttttatttaactcgtttagctctttatcagcttgattaaacaagtcttcgtcgcttactccccaagatgagataaactctgggctttgtatgtcattaatatcgacaatatcgctaaagccattccctaagaaaaagcttttcatgttatcaaaatggctttcaccgccgtagataaattgggtggtataaccggtgcgggttaatacatcggcaagagaaaaaaagttgtgctgtgatttagaaagttttaccacagagcgtgaaggggaaggagtaaaccccgttgtaactgcttcgataccacgaacagagcgtgtgccagtagcgtataaattatcaaacccccagccttgttgataaagtttatcaagctctggagtcacgccaatgccacctaattcaccaacaaagcgtgcgcctaagctttcctctaaaatgataactaaattcttttgtttaccggtgttaaaaggcaggttgttagcaagagtaggaatactctcagtgataaattgctgtttataggcggcttgcttgactgtttgtaaaatttcattacgtggcatggtgccatacaaactactggcatttttttcattgcccatatttttaatagcaaatgcgacactgtaagttgaattaagggccaaggagttaaccagcgagtcacttgaaaagtacactaacgcaggatttaacgggcgatgacttacagtacctcttgcgctaattaaacaaactaataaggtggtaacgagtattacaacttggctaacttttttagtgttctgttgtttactaaatgctgcgcttataaagcgatacgtaaacacacaacttaatgttgcaataattaagctgcttatcatagccagcagatggccatttaacagcatagagaatacttcttgaggataatctaggtattcgacaaataagcgatttggtcgcacatcgtattggttaataaacgcgggtgtcgaagcctcaacaaccacgattaaagtcacaactaggctgctataaagagtaaaagcatgttgaaataaagtggtcttactgcgcaaaaacacgttagcaagtaacatcaaaacagctaacgctgataggtaaccaaggctacttaagtcgattctcaggccacccattagcaccgctaagctatcgccatcaacgagccgttgctgttgccataacagcaagccaattctcgacagcataaaaactgccattaataataaggtaaaacgaaacaaaggttttaaaacggagagttttgctgtcatagtcgtacttacttaatcgaaactacggcaatagtaggaagcaaaacttaagaaatccttatggtaatcttaatattttctaaaccagaaaaacttcagtaaatcttaagtgaatcttaagtttggtggcgtaacctgatgacgtaaaagtgtttttacctatttgagtaacatatgaaattgttaattattgaagattcagtgtcattaagacgtagtctacgaattggccttgaaaacctaggttttaccattgatgaaactggcgatggtgctgaaggtttgagtatggcaatgacaggagattacgaattaatcatactcgacattatgttacccagcattgatggtattaccctattacaaacaattagagcaaagcagctcgatgtgcgtgtgctgattttatctgccaagcaagagcctgaagacaaagtgaaagggctgctgacaggggccgatgactacctaacaaaaccattttcgtttgatgagcttcatgcaaggttattaaacttgatgcgtcgcggtggcttgaaaacaatcagtgacgtgatccgcatagataacctggctttgaacttacaattaaaactgttgcaagtcggtgacactgtcatcgaccttacacccaacgaatacaaaattgttgagtgcttatttagcaatcaaaataaagtgattacatcagaaaagttaagtacttatattgctggacaatatgacttggtttcgaaaaactctattgaggcgcatttatcatcggcacgtaaaaaggttagagcggcaggtggtgagttacctattcaaaccaagcgcggctttggttacataattcaaggaaggtgatgaaatcaattcgcagtaaattagtttttactctatctatagctataacagggcttgttttaggtattttattagccacagatattgccgtcgacagctggatagataatgagtttaaccgtggcttacactcaaaagctggtatgctaatgacactggtgcatgaggacgaccaagggataggttttaaccacccaggtgagtttatgccggagtttgatggccgagttgaacctgagtattttcaagtgtggactgatgagggcgtacttattcgctcaccaagtcttgatttatttccagtaaagagccttaagtttcaagaactaaaactcggtgaagcgaaaataatgaccacccagttaccagatggtcgagatggacggatcatttatactcgctttcaaccgcagtttgatccacattcgcaccacagctcttatgatggggtgagtaagccgaactttaaaacactcacgttggcttatgccgcatcttccgaagaagttgattttatattatggcttatcgacattatttttgtggtaaccacagtaacagtcattgtctttattcgtttatttgtgcgtaaatcggtcgacagctcgctagcaccactcaataaattaaatcgtgatataagtaagctcagtatcgctgataaaaacgcaataattgttgttaaagagccagttaaagagctgcagccgattgtaaatagcttaaatgcctttattcaagaaaataggcagctttactttcgcgaaaaacgtttaacctcagacatcgctcacgaactaaaaacccctattgctgagctaatcaacatgaccgaagtggcaattcgttttcctgatgaaaaagaatttgaagccgattttaaacccgaggtactaaaaattagccaacggttaaaaagcattgtgtcgaacttattgctactgcataaatacagtaatgaagccttaccaaaacaagacgcttgtgatttaaatcaggtcataatgcgcatcttagaaaagtgcgatttagagcgagttgaatttgcacttcaagaagatataccggcgattgttagtaatctatttgcacttgaatcaatcatcaccaaccttgtcaataacgccaaacaatatagcccagaaaagagcgtagtgattgtaagtacgcagttgaatgacgagggtaagttgcaattctctgttactaatgaattaaaagtatccttaacagatgaagatattagccagttatttgatccactatggcaaaaagacagtgccagaacgtctaatgataacttcggtttaggtttatcaattgccaaggcgttaagtcgagcaattagtgcagagcttcatgtttcgttaagtgggcaaaacataatctttagtttgattattgcttaaggttttgcagctaattattttatgtgcaaaactgttcgtactaacatgtaataaaaaacaacaataaggaacaacacaatgggaaaaattatagggattgctttaattgttattggtgtagcactcgcggtttggggttacaacgtgtatgactcggcgagtgcgcaaattagccgaacttttagcggcgatacgccgattgaagcttggttaggtatggtgggtggcgcaatttgcgcggttgtgggtattttaaaagttaaatagcctcaaatattgaaatcgcttagctaatacctgatactgtaattatatacagtgtcgggtttggctatgaaaacacaattaccagcaaaatattatttaagtcacttctttgagcttgctgagtttattcaatctcagtgcaggcatctgcttttagcagagcagcagcaatttcttaaaaaactccttcaacttgatgagcaaagcttgtgtactttgctgcgtatttattctcgtaagccaaaaattgtcgcattgtcatcattaaattatgaagagatccctaatcttcacggtgctatttttaagttaaaacaacaaggactggtagcgcatcctaacaacgacgaattagatctattgcttgaacatttaacaaagccaaccctgttaaccttattagcaaacgatgcgttaatggcaactcaagctggttacaaaaagtcagccagtaaacagagcttaacccaactgtgtaaacaacatatcgatcgtagccacgctgatttagaggcattgtttagtcagtttgtagttaatagccgagaccaatattatgaatattttgagtttttatacagtggccgactgagtggcggcgatataaatcatcaaaaccgatttgtgatgcgtgacttaggaattgcaaaagtgcgtagcgatgtcagcgagagcttatcgcgttttcaaacgctagccgaggcacaaacacattatcaattaaaccaattacgcatgcagtttaagcaaagcgagtcacaaacacagtatcaaaacttagcccatgcgcttttagctatcagctgtgaagatgaactagcccagagtattaaaaataagttacttattcgcctatacaaacaactcaaagagcataacttagcatttgcatttgagttacttgagcactgtgaaggcagcagtgaagcgcaagagctagctattcgccagcgttataagcaaggagataaagactgggttgagcaaaagcttgaaagtattattcaagacccacttgatgatggcattttgtattttgctgaagattttttacagcgtaaatataacaagcaacaacgttcacgcttaacacaaatgctcatggatacagagcatcaattagaggttgatgatatttaccgtggcgatgtagagcaaggagtgtgcgagcactatcaacagcttggtaacacggtattttttactgagaataacctttggttgagcttctttaccttgacgttttggcaagagctttttatagagactccgcacccgccgtgtaatgaatttgatatttacccaaaggtgttgcaggctgattgcttttacactttgcaacaaacacaaattgagcaaaagcttgcaaatttcactagcaatgaagccttgtataaacatgtctgcaaaaatgcagggcagttttacgaaacacctaatggtgtttttatgtggcatagcgatattttagagccgctagaggtattaataaaacacagcccgcttgcaaatttaaaagcgcatttattacaaatgtcaaaaacctttaagcagctaaaagacggttacccagacttgatggtgctaaaaggggataagctcacctttgaagaagtaaaagcccctggcgacaaactaagacgtaaccaacttgtcagtattgaggtgttaaaacagcagggctttgcagtaaacatcgtcgcagtaaattggtttaatgatccgaaccgtatttatagtgtcgttgatatagaaaccacgggtggcgtacaaggtaataataaaatcaccgaaattgcagttgtgcagttacaagcgggcgaagtgataaagcaatgggcaagtttaatcaatcctgagcgaagtattcctgcttttatcactaagctaacaggaattaatgctgcgatggtgcgtgatgctcctcgctttgaagaggttgccgatacactgcgttcacttttaaaaggcagtgtttttgttgcccataatgtgaattttgattacggttttattcgcaaagaatacagtgcaatcgggcagggctttaaaatgccaaagctatgtacagtggttgagtcgcgcaaagcatttccaaagcttaagtcttattcactcggtaatttagcggcacattttgaattgaatttaactaatcatcaccgagcattagccgatgcgactgccactgcagagctgctaaaacttatccaacaaacacaatcaaaaaaggcgagttaatctcgccttttaaacttaaacgttatggttattcgtactcgatagggtcggtaacgttatttaatgcgaaagcttctaagcgttcttggcaggcaccacatttgccacaggctttgtcgcggccgttgtaacaggtccatgtttggctgtaatcaagacccatttttaaaccgtctgttaaaatgtcgattttggtattgtttaagtacgggctgaaaatctcaacagcgtcgtaattagcaatacggcaaacatcatccattttttgcacaaactcagggcgacaatcaggataaatagcatgatcgcctgagtgcgcaccgtaataaactttgctggcttttaaagacaccgcataacccacagcaagtgaaagtaagatcatgttgcggttaggcacaattgtgctcttcatgctttcttcttcgtagtgaccttctggcacgtcaatatcgtcggtcagtgatgaaccaccaatcaattggttgatcgctgaaatatcaacaattttatgtggaacacctaatttttcacatacttgagcggcaactttaagctctttaacatgacgctggccgtagtcgaacgacagggcatacacttcgtggccttgttgcagggctttatttaatacggtaaacgagtccataccgccggaataaataacaactactttttgcgtcataactgttttgctcttacttttgatagaggtttacttcagggcgcgatatactacacggctcgggcctaaataacaatttttgccagtgtttttggtttatctgatggtatgtattttataccgtcgtgtcgtaagtgagatgtcttttgtacaaaattaacgaagtgtttgaaacaattcaaggtgaagcgagttttacgggtacaccttcaatctttttacgtttacaaggctgccctgtaggctgtgcttggtgtgatacgaagcaaacatgggatgttgataatgtatataaagtgtctcttgatgacacggtcgagaaaaaagcggattctgatcattgggcagaagcatcagcagagcaagtattagcattatttaaagaacgtggctataacgctaaacatgtggtgatcaccggtggtgagccttgcatgtacgacctaaatccagtgtgtgaattattacatgcaaacggctactcaactcaaattgaaaccagcggcacatttgagattttagcgcctgagcaaacatgggtgaccgtatcaccaaagattaatatgcgtggtggctataaagtactgcgcagtgcgatgcagcgtgctgatgaaattaagcatcctgttgcaatgcaaaagcatgttgaagagcttgaagacttattcttaaaaacgggtgtgaatccacgtttagtgtaccttcaaccaattagtcaaaagcagtcagcgaccaaacttgctattgaaacatgtattgagaaaaattggcgtttatcagttcaggtgcataagtacttagggattagttagcttccgatgtactgattaaagatgcgtgttgtgctctgtagaatatatctttgagagggcacgctctactctttagtcagttgttcattcattaatattcaatggataatgagtaacttagctaaatcaatttttccgattggtgatatcgatatttccgattgttcatttctctgtaacctctttaaactatcttacaaaatatcagtgcttactcttggtttttagttttttggaaccatataaaggtaagtattgcttatgcaattggaaataaactcaaatatttggagataaaaatgggtgtattagttggccgtcaggcaccagactttactgcagcagctgttctaggtaacggtgaaatcgttgaaaacttcaacctaaaagaaactatcaaaggtaaaaaagcagttatcttcttttacccgttagacttcactttcgtttgtccttcagagttaatcgctttcgacaagcgttttgaagagttccaaaagcgtggcgttgaagtaatcggtgtttctatcgattcacaattctcacacaatgcatggcgtaacactgccgttgctgacggtggtattggtcaagttaaatatgcactagttgcagacgttaaacacgaaatctgtaaagcatacgacgttgagcacccagaagctggtgttgctttccgtggttctttcctaatcgacgaagaaggtaacgtacgtcaccaagtagttaacgaccttccactaggccgtaacatcgacgaaatgatccgcatggttgacgcgctagcgttccacagcgagcacggtgaagtatgtccagcaggttggactgaaggtaaaaaaggtatggatgcaagccctgaaggtgttgctaaattcctttctgaaaacgaaggcgacctataatttaggcctttgttagcgaattaaaaaacccgccaattggcgggtttttgtttttaagctcaacgagattaattaaagcgcattgttagcttagtatagaaataacgaccacgtgggttatgtacgctcgatacatagccatataagtcgccatcaccatcgccgattgcgaacggaggatcttcatcaaacacgttattcacacccacagatagtttgattttatctgaaaagttatacgcagtttgtaaatcaaccagtgtttgcgaatcaaccatacgtgatgtgttgctatcaaagtctaagtttccatcaaagtcgatgtctggtgtatcttcaaactcgcctgtgtagctaacgttcacattggtattgaagtcacccatttcccaatttgttgagaaaatccaacggttttcaggataacggtactcgcctgtgtaatcgcgaccatcttttttaaattcgttttggtatgcccattctaaattgaattttaagaagccgtaatcgttcatagcatgagtgtagtttgccgacacatcaacacccgatacttcttgcgatgaaacgttttcaaaggtgctgtaaactttttggattacacctaaactttgaccattttgtggtgccaaacgcacacacacagtgctgttttgatcgttacagttgttatcatagatagggccgaactcttgttcgtctatcttattatcttgtgtaatgctccatacatcgattccaaagccaaactcagcggttggtgcccaaatgaagcccacgttccatgactctgattcttcagcttcaaggttcgggttacccgcaaattggatattgtaatctagagcattacaatcctgtcccgttgcctgacaacgataagtatctacaaagaactgactttcttcagatggacctaaaccaatctgtgccagtgaaggagcacggaaaccttgagcccaagaaccacgcacagtaattgaatctgttggtgcccagcgcacagctactttagggtttgttgttgaaccaaagtcactgtaatcatcgtaacgacctgctaattgcagctctaagttttctgctaacggaattgaaaactcaatataagcagcatactgatcgcgctctgctgcagctgatacagactcagtaccaaagattaacccgcgttggaattggtcatctggaatatcgctcacatcttcttcacggtattcaatacctgcagccatcatcactacatcatcgccaaagctaaatgcttcaccactgatatttgcatcaaatgatgtcatgtgagattcgccacggcgaactaagcttgtggtaatacgatcaataactgcttggtcattataggtgccaccgaatgggttatagttacctgcgtcaatttcttgttgtaagaaatcagtgcgcacccaaccttggcttctatcgcctgtttgcattgatttactacggcctttttgaactgccgcttcccagctccagtcactgatctcacctcttaaaccagcaacaaaacgtaacgtatctgactcaatgtcccattgacgagggcctgcatctaccgttctgtagcgaccaatctcgatatcttggccaaatgggttatttggatgacttgctggcactgttaagcctgcatcttcatcaagaggggtaggggcaccagctgcttgcgatgtattatgttgtacagccacttctaagaaagctgaaataccgttatcaaagttgtattcaaactgtgatatagcaccaacacgctctgacgccggagttacataaccaaatggaccgtagtcaaataaacagctcccacttgctgtggcattttctgccgggcatgcagggtcaattgttttttcgccatctacgtaaaagtagccagggaagccacgagatgaacgaaaatccatgccgccataaggttcttgatttgcagtacctaagcgacccatttcatcagaagacagcgctgtgttgttaaagtagtcaataatgattgacgcactgcttttttcagtactcgtaccccaaactaggcttgccgttttttcttcgtagttaggaccatcagtaccgccgtaacctaggtttacttccagaccattaatatctttctttaagatgatattaactacacctgcaactgcatcagaaccataaattgctgatgcgccatcctttaaaatatcgatacgctcaatagcagagactgggattgagttgatatcaacaaatgaattggtaatgctttctgcaaaggcactaatagatacacggcggccattaattagtaccagtgttgcatctgaacctaagccacgaagactcactgcagcggcaccatttgctgttgagtcttggttattaccgcgcgtagagaaagttccattacctgcaactggcatacgctccaatagttgctgtagattgtcgtaacccatattgtcgatatcagcacgactaatagattgtaccggtgaagggccttcaatatcagagcgcttaatgcgagaacctgtaacttcaatacgctcgaccttttcagctccatctgattgtgcggcaacagacataaaacttgtgccacttaacgctgcaattgtaaatgcatagagaggtcgctgtataaagcggtgggtgttcttcataaatttcaatccttgtttaattgtgaaagtattgtgaaaatatcacagtaaagattgatatcatgtaaatgatattgtttgaaatagcaaaaaagtatgggtttttagaaagggtattgatttatttgtaaaaagcgagagtttataagggataagagcctaaccttaagttaggctcaaagagcagaattatgctttatgtttcattaggcgttctttttcacgcgcccaatctttgttttttccgtcttcgcgtttgtcgtgcatctttttacctttagcaaggtggaactccaacttcacccagcattttttccagtacattgcagttgcgattaaagaaaacccatcgcgttctgtggcaccgataagacgatcgatttcacgcttatttaaaagtaacttacgataacgaagaggatcgcaaatcacgtgagtagaagcactattgagtggctgaatttgactgccaagtaaaaatgcttcgccgtttttaatatgaatataagtctcagagatgtttactttaccagctcggatactttttacttcccagccctgtagttcaacccctgcttcgaacttatcgtgtaaaaaatactcatggcgcgcttttttgttaagcgcgatggtattacttgtcgatttagatgattttttcttagccatagtggctcatattatacgtaaaaacagcgtttttacatcgcttttttaaggctttgcataaattttcacgctactaaaatttggggaaatagccaaagcttgctaaaattcgccgacacagttgggagtgaatatgccgcagatagaaaaaagtgcgctggtaatgtacagcagtaaagaaatgtttgatcttgtgaacgatgtagatgcgtacccagagtttttgccgcattgctctgatgcgaagataattgcacaacaaaccagcggcatgacagcaagcttagagatctcgaaagcaggtttgaaaaagtggttcaccaccgaaaatacctttattgatgagcaaacggttacgctacgcttagtggatgggccgtttaaaaagctacagggtaaatggcagtttttacctctagatgagcaagcatgcaaagtgcacttacatttagagtttgaatttgccagtaaactaattgagcttgcttttggtaaaatatttaacgaagttgctaaaaatatggtgaatgcgtttactcagcgcgcgaaaactgtttacggagcacgcacatgattactgttgaagttgtatatgcgctacctaccacagcgacaagtttacttgttgaagtaccagtagggactagtgcagagcaggcggtgataaagtcaggtatttttgacaaatgtcctgaaatcgatgctaacaatttaacattagggatctggaatcgaacctgcaaattaaatcagcaggttaaggatggcgacagaatagagatttatcgcccattaattgcagatccaaaagatgcacgcagacgccgagcagaaaaagcaaaagaagaaggccgagcaaacaaagtaacgggcggtcgtcctttaaataaagcataacaaaaagggtagctaagctaccctttttgttaagtgtgattcgttactcttgctcgagcggtgtattgaattcacttggctgttcataatcacctgaaagtgaaaccagtttatcgttttcaaagttaagcgttagtgatttacgctgttcgttactacgaccaatattaaatacataaagataatgccatgtattattgtcgaatgaatcttcagctactggtttaccaagtacataaagaacttgttcgcgtgtcatattgacgcgaagtttatcaacgtcagattgctctaaaaagttaccttgtggaatattgatacggtaaacccagcttgaacaccctgctgtagcacttaaagtaagggtaagtactaaccaaaaagaaaaagttttaaacgactgcattatttgtttgaatccttattttttatacactgcataataccgattagtcacagaaggtaaaacccttttcagtaattgtttttactgaaatgcgattaacaatcacgaggcataaatttgaccacagataatacagaaagtttacccgatccaataaaaaacagcgataactcagatgcttcatggcatttgtatattgttcagactcgtttagggcattggtatacggggatcagtaccaatgtgcaaaaacgttttgaagcccaccaagctggcaaaggtgcgaaaaatttaaaaggcaaagggccgcttaaattaatttaccaacagcaagtgggtagtcgcagtgaggcaagtaaattggagtgtcgcgtaaaaaagctcactaaggcgcaaaaaatacagtttgtagccacatctaaattacctactaagttagtcggttagcttttccataaattcagctattttttgaatagcgtgttcatataaatcgaaattgatgtgtgcaatcgtatcagtgctttgatgatggtgcttatcatgacccataccaaagtaaatataaggaatgtcagctttagcaaaagagtagtggtcacttgccttaagccagttaacttttaaatcaaacaaacggtttaaatagtgcgaagaacttgttgctataaaccgtattttctcgtcagacagtgagtttatggcgtttttgtactgcgattgatgatttaaaaatgcgatcatacgcggtttgtgctgattaaccaccaacatgtctaagttaatgttcagctttacgtcgctaggatttaatgtagaaacgaagtaattactaccatgtaagccattttcttctgcatctgtagcaacaaacacaagcttatatggggatgatttctcagcaaaaatggctgctatataaagaagggctgcaacaccgctggcattatcattagctccagggtaaagacgactgccttgtaaacctaagtgatcgtaatgtgcggttaacacgattaatttgcacgattggcagctgtttggctgaacggcaataatgttactagcttggggttgctggtaaaaggtgcctgagtagtgaaggtcttggcgttgaatttgataaccaaggtcactaaatcgctgggtaatatattctgcagcccgcttagcaccaacagtattcgtttttcggccataaaactggtttgaagtaagagtcgctatatcgtgttcaagctgtttctttgagcttgcattgacttgaaaacagcaaaagtaaattaaactagtcgtgataagacagttttgcagtatgtgaacgaagcgcgcgtagcttgctttcatagcgttttttatcttcctcaaagtcagctttatcgttagccatggttaaatattttttagccagttttaaatcgccaagttgataataagttcgtgctaaaccaaaatcggtatcatgtaattttgggtcaagctcacgggcttttctgtaatgcttgatagcatctctatagcgttttgttgtataggcatcattgccaagcgaaatatgataatacgggtttgcttggcgttttttgtcgagcatagctaaaatttcgcgaccttgctgtactctgtcagttaaattataaagccgagctaaattgccaagagcagtgttgttgtctgagtttaaggtgattgcatattgatacgctgtttctgcacgctgaaaatcattgttaagcctaaaaagtaccccaagatttccccatgcaccagagtatttatagtccgcattaatcgcagctaaataataactgtaagcaaggtcatagtcatttttcagcattgctgaaacacctttgttgttgtagaacatagcggtgattcgggctttattaatgttagttgttctaaatgcttcttggcgactattcggatcaaaatcgataataattgcccgttcctgtgggtaaatcaccttatgatttacggatgctttgttgctttcttttacttttaagtttatgtggcctgttagcaaattaaagccgttattgagggcccaatattcaggtatatgaacttgttgaaattgcccttcgagtccgaggtgctcagctaagctgtaagctaatattgatagcgataaacagtttgcatttagattggcatagctttgacctgccgtaagtgttgcacctgattgatatgaaagtgacgagtctccatttttaagcaaaaaataaagtaactttttggcattttgtaacgttcgagcttctttaggaaaggcagtgttgagctgctctttaatttgaggggttaatgcaaatatctgctcttggctttcgacctcagatacaatgaattcgttggcttgtgttaacgacagcggtgggggaactaagttagtttgtgtactattgcaagcggttaaaaaacttagactcgatattaaagcaacggtaattgttttcatctgaccctctaaattcatggcctaatactatttaagtataggccgtgaataaaaaagggtcagtgttatctgttacaaaacatgtcagcgtttatcaaatgtagcaacaaggtcatctaaggtttgtgcgctacttgctaaatctttaatcgcttgctctgtatcaatttgctcacgcatcacggtatcgctgatatcactaatttgctcaatgttgcggcctacatcagctaccacgttactttgctcttcagtggcggtcgcaatgagtgttgccatatcattgatttcattagctgcatcattaatggcattgagtaactctactgaactttgcattgcttcaacgctaacctgagcctgtgatttcgagtgatttatatgatttaccactgagtcagaggtactacttagttcactgatcatggtttgaatttcagttgttgattgtgaagtgcggtttgcaagtgctcttacttcatctgccacaacagcaaaaccacggccatgctcaccagctcgtgcggattcaatagccgcattaagagccagtaaatttgtttgctctgaaatacctctgattgagtcaacgatactggcaatggcttgtgtcttatgtgccagctcattcacttgctctgtaatattatcgatatcggtcgccagttctattatcgcttctttactttgtgtgacctgagtgtggctttgcttagtattatctttgctgctttgtgttaatttggcagtatttgcagcacttgaggctatctcttgcacggttgcgcccatttcattaatagcagcagcaacagaaatagtttgctctttttgattatcaagcgcttcagagttcttttgcgcttgtttaaaaacatgagaggcactttgtcttatttcgctactttcttgtgcaacttggctgatagcggtttctatcttagaaataaattgattgaaaccagctgataaattagcaagttcaggctgctctgagtcaggtagtcggtacgctaaattagcatcacctgagcctaaacgagtaaacagttcagccatttttgaaagaggagatgacagtgtgcgtgctaataataagcctgcaaagctcgctatcagtgcaataacaatagcaaagcttataatttgccattgtaaaacttgaatgctcgaaaatacttcatgttttggtacctgagcgataacaaatagatctgtatttttgattggacttgcagcaattaaagtggcttcaccattaagctcgatttcttgaaggttgaagtcttggtttgttaagagtgtgtttgtaatacccggcgagtagatactatcaagttttgctttcgcgactttatcagcatctttatgcagctggattaacccatttttgtcagctaaaaatacaaaccctgtttcttcgatttggaagcgctttagcattgcttgcatatcgtcaatgctttttgcaaggccggctaaaccaatgccattggtttgctggtggtttacaaacattttcacatcagttggtgattcttgatagatactaatagaaaacggctgcgttgtgttagtgaacgcaaaaaaccaaccatcttgatctttagttaaaactcgcaagaaaccgtcttgattccagtattgtgccgtttcacgattagcccaagaagcggttgctaaatcgtattgcttaacgaggcggttaagctcttttagcagtgttttatcatcagtattgcctgaacgcgcccactctaatacaaattcgttactagagagttgctcagcggcgctgatcatttgatttatatcgtgagtaatataattatcaattgcttgcagcttgctaggtagctcagattcaatcattcgttgttcgatgatttgttttgcactgtacagagctgttgcgccaatgagagcggcaacaattaatgcaattgcactgccaagcagtgttatctttttagtaatggtgagttgatttaacgccatgaaagtgtcttagtttacaacatttaagtcagtaattttagcatacactttgcagatgacgaatcaatgtaggaacaaaaaaaaagcccaaagcatattagcaattgggcttggtttctaacaagcgaaacttactttccagggttaaacaattttcttcattgctgacatataaccacgtagcttgctacctactacctcaactgggtgctcacgtagagctttgtttacagcaatcaatgcttggttatctacttgattacttgttgtatctaagcctttaccaattacatctgtgtcgatgtttttcataaagtcttgtaatagcggtaaacacgcatggttgtataggtaacagccgtattctgctgtatctgaaattgttctgttcatttcgaatagctttttacgcgcaatggtatttgcgataagcggcgtttcgtgtaatgactcatagtaagctgactctgcgataatacctgcagcagtcatggtttcgaacgcaagctctacaccagccttaaccattgcaaccattaaaataccttggtcgaagaacgtttgttcgttgatttcttgatctgtattttgttgcttttcaaatgctgtttcagctgtttcagcacgccatgcaagtaattttgcatcgtcttcagcccaatcagccatcatgccacgagaaaactcaccgctgatgatatcgtccatatgcttgttataaagcggacgcataattgtttttagctcttcggctagttcaaacgcttttatttttgctgggtttgacaggcggtcaagcatgttagtgacgccaccgtatttaagagcttcggtgattacttcccaaccgtattgaattaatttagatgcgtagcttggatcaatgcctttttcgaccattttatcaaaacaaagtagtgaacctgtttgcagcataccgcataaaattgtttgctcgcccattaagtcagattttacttctgcaatgaatgatgactttaatacacctgcacgatgaccaccggtgccaacagcgtatgctttagcttgtgcaagaccatgaccttgagggtcgttttcagggtgaacagcaataagagtcggtacaccaaagccacgcttgtattcttcacgaacctcagagccagggcattttggtgcaaccatgataactgttaagtcttcacgaatttgcatgccttcttcaacgatattgaaaccgtgtgaatatgctagtgttgcgccttgcttcattaaaggcatgattgcagtaacaacagaagtatgttgtttatctggtgttaggtttagtactacatctgctgttggaataagttcttcgtatgtaccaacagtaaagccattttcagttgcgtttaagaatgattgacgacgctcggcaatagctgactcacgtaatgtataagaaacatctaagcctgaatcacgtaagttcaaaccttggttaaggccctgagcaccacaaccgacaataacgagtttttttccttttaaagcatcaacgccttcagagaactctgaaggatccataaattcacactgcgctaattgcgctaactgctctcttaaaggaagagtattaaaataattcgccattgttagtgtcctataaaaaactaatttgttagaaaacaaagagccaatctgttgccccctgtgtgagttaacagtatgcaattttttgccttgcgtaaaatgatatatttgaattaaagtgtttcataaaatgaaatggtgggtttatggatcacaaacatctacattactttttggctttagctaagacgctacatttcgccagagcgagtgagctttgtcatattagtgcgcctacgttaagtcgaaatattaaacagctcgaagaagaagtcggagtggtgttatttaatcgggataaccgctctgtaaaattaacacgagaaggtgagtcttttattgagtacgctaatgcgacattggccagttggcatcgttttaaagcaaatgtccaagagccccagcagcatatttatggcaatgtcagcatatattgctctgtgactgcatcgtatagctttttacatcaaatattagaacagcttcgcatgcagcacccttatatagagatcaccttaaataccggcgatcccgcgttagctattaaccgagtattagatggccatgaagcaatggcaatcgcagcaaagccagcaaaattacctgggcaagttgcttttaccagtattggttattctcctttggtattaattgcaccaaaaattgtctgtccgatcagcgaaaagcttgcaagtgctgagcaaattgattggtctgctttagaatttattgttgctgagcaaggtttatctaggcagcgcctagagcaatggtggcgaaaaaataatattcatggccgtatttatgctcaggtggcagggcacgaagcaatggtttctatggtgagcttaggtttaggtattgctatggttcctaaaatcgttctagataatagtccattaaaagacaaggtgcagatagttagtgatgcagagcaaagtattgatggctttgaaataggtttagctgtgctaaacaaagagcgccacgatcctgctttaaacgcaatttggagtattgcacaatcaatgacacaacaggcaatctaatattttaagatgatacaattgaaaagtagttgttagtgagcggtttggcggattttatattagttatttagtattggtttagaaaaaagtatgtcgtgttttatgctgtttttttatacttcaagcggtttttatattgattttttttaagcgattgctaacgtgaatctaaataataatatcaggattgcaaagatttatgaccctgtcagcacaagccggacattctttaagtttttcaagtcactgtttaaaacaagccatccctttgatggttaagtataaaatacctattacgccactcaattatgcgctgtggtattgctatgttagcgaaaagaatcacgagctcagtcaagaattagacactattatcaataaatacaatacctgcagcactgagcaagccaattacttgtttaacaaatacctttcaaatgatgacatggctttgttttatcaactatctgatggatttagtgatgttgttggtaaggtccatcatgatattagcgaggcactaacttattctgcagagtttgattcggttttaaaagagtgtcgtgacaaacttaatgaggccgatataagccaagagagtggctttgatgaagttcttttgtgtgttgagcgtttgagtgacaaatctgctgccttacaaaatcgtgctcaggactttcaaaatcaacttgcgcatgcttactcagagatcactgagttaaaacaagagctcattaaatctcaaagtaaggctgaaagagatcccctgacagggctgttcaatagaggcaagtttgacgaagatgtggttcagttttgccaagcacctgatatttctggggttgccgtacttgttatggttgatattgatcatttcaaatcatttaacgacacttttggtcatcaaaagggtgatcaaacattgcgcgctgttgcaactaaattattaaaacatgtctcgagtgtcgggcaagtataccgctatggtggagaagagttctgttttacagcacattttgccacaatcagtgatatgaccaattttacccaacagttacgtcaagctataactaagttacagatcaaagaccctaaatctgagactatcttaagacacgtcactgcaagctttggtgttgcgattaaatctaaaaatagtcaaccagaacaacttattgcaattgccgatagggctctttatttagctaaagaacatggccgaaaccgcgtcgaaattatcgaagagtaaccagcataaacagagtttatcgatatttgtatcaaatttgtgaatagttgtaacctagcaaggacagtttgttcacatcttgatagtatgcagtcattagaaaatctttttggtcgtaacaacaataatgaagtctcaagcgatcaggatgtgcgcagcgatatatgctttgactgtcatgttagttaatcaagcgtatgctgatgattcaactcgcactgaacgtgaaagccgcaaggcaaaccaagaaatagaaaccaatcaatggcatatcagtattaatactggtattggtgctattacaaatccattacacggtggcgataacttacccttagttttgctccctgaagttgcctactatgcagataagtggttttttgacaatggccgattaggttattcttttttagagagtaactctcatgtgcttaatgttgtcactgagtttaaccccgaaactcgcttttttatcgattttcatccaagcaatgtatttgcgctaaattcatctagtagctttatagtcgagtcaacaagcagcaatgaattaagcagtaaaacagtatctgttgatgatattcgccatcgacgttgggcgctcgatgcaggtcttagttatcattacattcaaaataaccacgtcttttctgtgcaagcactaatggatgtttctggtgtttacaatggaatgcgaagtgcgctgcaatggcagtctcattatcaagtaggtaacctcagtgttgcaccaagtctcggtgtttggtacaaatcagccggccttaatgattatttttatggtttatcggctgaagagacctcatatggggaaattgatgttggcagtagttggcaaccttatgctaaaatcgacgctcgttggccattgagtgaggctaactctcttcgttttcatttagcatattatgactattcagccgtggatgacagtccgctttttgaacacacgtattcaatgactgcttttataggattcaatcatattttttaatatgaagtattttgtttttagtctgtgtgtgtttgcagtagttacttggccgttcccaagccatgcgcaagcgactcagtttgatatctcacctaaagtgtgtgttgtgcttcaacagcatgagttttgtgatcttgatttaaaaattagctggcaaatagcgcagcctcaagatctgtgtttataccaaaatgagcagcagatacagtgctggcaaggtcttcgcaaaggggtgttaaaccataaagcgcgggttcaggttgaaacaatatactccttagtcaatccgcatacggggagcgaaattgcaaccgcaaaagtcgaagtgcaaagcactgaagcaaaaacaaagagacgaagattgcgctcaccgtggagctttttttaattcaggagcaaccaatggcaaagattttacttgttgaagatgatctaggcttacagcagttaaccaaggattaccttcagcataatgggttggatgttgcggtccttgaacgcggcgatgaagtattcgattatttagagaataacccagttgatttaatgatattagatgtcatgttaccaggcaaagatggttttagtgtctgccgtcaagtacgtgataaatttaatctacccattttaatgctcaccgccaaaggcgaagattttgaccaagtgattgggcttgaacttggtgctgacgattatgttattaaaccagcagaaccacgtgttttacttgcacgcattaatgcattattgcgccgaggccaagcttcaaataaagcacctgaagagctcacgtttggtgatttaagcattgataaaaccagtcgcattgttacacttaaaggcaacgaaattacacttacatctcatgagtttgagttactatggttactcgcttcaaatgcaggtgaagtgttaagccgtgaacatgtacatcaacatatgattggtcgtcagtatgatggcttagaccgtaccgttgatgttcgcgtatctcggatccgcaagaaactaggtgataatagtgacaaaccatatcgtatcaaaactgtttggggccaaggttaccttttcgtatctgatgcatgggacatgtaatcattaatggggaaactatttgctagcttatatttatatataatagtttctctgtttttagttagtggggtcatagaacagttatggccctatgaagatacacagcaacatattgcacttgatcaagaatttggcaaatcactttggcttctcagtcaaacagaagatggtttaacaaaactaaagcaagagtttaatagcgagataatcaatcgtagcgatcttgcccttcctgaaaacctgaaaacgcaactcaatgaaaagcattacctctatgtgtttaatcatgaccagcgtgtagtttggtacgtagccctgaatgatgcgcaattgttgcatataggccctttatctgtagctaaccctagctttagttccgtttggccttactttttattattaactgtgattggcttacctgttgggctatggagctttttactttggcgagactttaataagttaacgcttgcatgtgaagctgtgggtggggcacaggattttgaattacaagatgcatctaaatccttttttcttcccattaccgataccttaaatgcgttgcaagaacgtattcaatatcttttagcagcgcagcaagaactgacttcgtctgtttctcatgaatttagaacaccacttgcgcgcttaaagtttgcagtggcgatgctagaggaacaaattgagaatgagaaatcgtttatctatattgataatatgcaggcagatattgctgagcttgaagccttggtttctgaaatgctcgaatatgcacgacttgactctcatcaacccagtttaaaaagccattcttgtgatttaaccgcattagttaatagtgtggtaaataaacttgagtttgctacagacattgacattgcagttaatgcgccgtcacagctttattataattgtgatgagcactttattgcgcgctgcattcaaaatttactcggtaatgcacaaaaatatgcgcatcataaaataaatttgatacttgaagaacacccagatgccgttcaaataatagttgaagatgatggcccaggtattgctcagtctgaatggcagagcatcctaaagccctttacacgattagataaaagccgtgataagaaaacagggggttttggcttggggcttgcgatagtggctaaaattgtcagctggcatcgaggacaactacaggtgtgtgactcaacgctcggtggtgcgaagtttgttattcgattatttaaagataagtaaatctcaaaaaccttataccaatccgcaatgaccgagaacaacttaatgacgtaattgttatcttgttataaaggcggggttattgccacaactatgtttacttaagtaactggctattactttgactaaatgttacagatataaaaaaagcgcctgaggcgctttttaaaggttaaaaccaaaaataaacaagtagcaaagtaatagaccatactaatttataaaagttctcaaaaaatttaattatttttcatctaatagtggcattagcattttttcaagaccattgagttttacttcgtatatcatcgcaagttgtgcccctaattgaccctcaggaaatccctgctgtttaaaccacactaaatatggctcgggtaggagcagcaatggtcgacctgcatacttgccaaagggcatctttgtatttatggcacgtttgagtagtgctggatccatcttattctcagatttgtataaaagggagatgatacggtaaaacaaggagagaaaataggctgtgacgggcaagaaacagcctatttagtgagggaggtaggccctctgaaaatattcactaatttctaataactattagtgaagttgatatcgacgtttttttgtaaaaccaagctgtttgagtttaagcagaatattagggtcatcaattctatcgggtgtgtcgatttcacgaagaaaatgatcgcttggtacttgataaacatctagcatcttgttgaatagcacagctctaatatccgttgctgtcataccattttgctgtaactcatcaagccgctgttgtatatctacaagtttcccggaacgtgcatcatccgtgtttgctaaaaactcactggtaaacttatctttcatttaaataacctcaatccatttaactacagtgtatcaaaaaggcgcaaaaccacagtgaagttaaacgtttttgtgttaaaaatagatacttagcttagtaccttgagattgattctactctttttttagtagagattgctattgttgatgtaaagctttgtaaatagcgttgacctagtaaggggacgagggtttaaaggtaagaaaatagacttggcaactaactgaatatagtgaaataattctcggttccatttagaggaaccgagaattattttttacattatgaaaaaagtttctgttttacatgctccgcaaagccactaccggcctctaaatagaagttgtaagtagagtcaacccccatatcttctaattctttttgttggtcagggtaatttgctatcgccgttacttgaccttgataacctgaagcccgaagttgctccaaggcaaaaatattttgcatatgcttaggcattgccaacataaccataccaacatgtgaatggtttactcgttgccaaaaatcagggtcagttgcgtcggcaagtaatactcgacgaccacgttgaatatgtttctctaccacatcgggttttatatcgataccagcaacaaggtttggatgagtttgactaattgtttcataagcaccggttccaatccgacccataccaaatatcacaatcttagtatcgttaaggttaactggcagctcttctgcaagccgagtatcactttcaaatttaagtaaccagcgctcaattttaacgtagatttcattcgaacgtttgttaaggggggatgccaaaataaaggtgatcgaaacagcaattgccattactgcaagccattctgaagtgatcatattgcttgatgctgcaacggcacaaacaataagcccaaactcactgtagtttgcaaggctaaaagcacttaacaaagaagtacgtgcgcgcagtttgaatgcattagttaatacataatacagcgccacttttatcggtaatacgaaaactaataccagcgcaacaagtactgcgtggctagttagctctgcattcaaaccaatatttaagaaaaaaccaacgagtaatatatcttttagattaagaagagactttgataattcacccgcttttttatgtgcagcgaacatcatgcctattatcaatgcacctaaatcaccttttaagcctgcaaattcaaaagcgtgatagccaataacaagggcaaagaaaaagccaaataaaggtaataactcaccgtgctttgatcggtttaatacccaaaacataactgggcgtaacagaggtaaagcaactaatagcgccagcgcccaaatgttcggcgcttttcctgtactaatagccaagaagatcaccgcgaagatgtcttgcataaccagaataccgatggagattttaccgtgcagactggccatctcgccgcgctcttcaagtaccttcacagcaaacactgtacttgagaaactaaaagcaaagcccactaacaatgcgctttgccatgtaagctcgctgaataaaggcagtgcaattgcgccaagcagcagcataaaagcactgaacagtgtgctactaattacaatatgtaatgaagcaggggcccacacctgaggcttgattaaattagccacttttagtttaaggccaatactaaatagcagcagggtaacacctaagtttgcaagggtattgagtaattctgttgttttatagccatataaattaagcgcgaagcctgctaacaaaaagccaataagaggaggaagctttaactggtaaacagcaaagccacagacaaacgcagtagcaaagtagattaattccataattattcttgtaacttcatttgttagcagtgtagcgaaatatttcttattggaaaacaatatcgaagcagaagagtttaaaaaataaacacatttgcgctatttattgattaatccgtcaaaagtaccattttttcgctgacaatagcttttaattgtggttaagatgcaataacgaaggaatttaagtcgtcttttattaaagttggcttaaggagaaaagatgtttaagaaaatccttgcatcagtaggtattggtgcagctaaagttgacactgtacttgagacagagcacttgcaaccaggtcaaaagttcaacgctatgattgtgattaaaggcggtgatgttgatcaagaaattgctggtttagatttggcgcttatgacgcgtgtaaaagttgaaagcgaagaaggcgattattttaccaatcatgtcattgaaaagtggcgtattccagatattggtattatcagtgccggtgcagaaaagcatatcccgtttgaagcacgactacattctgaaaccccaataacagaaatcaatgccggctataatcaatcccatgtctggcttgagacaggtttagatattgatttagcactcgacccaacggatcgtgatgccttacacatttaccctaatgatgctgttagtacattaatggaagcaatggataggcttggttttaatttagtaaaagcagatgttgaaaaaggttatttgcgcgcacctacttttcaatctcattcaggctgctaccaagagcttgagtatcgaccaaacagtcgaagcttatttggcttacaagagattgaattatcatttgttcctgaagctcataaaacacatgtgctaattgagcttgaccgtgcctttagaggtgatggttatgtggatttaactattgagcatgatcacgtaaatctatcccagttatgtgaccagcttgaacgattatttgcttaaagactaacgactgaatagttagttaaaacccagctaaggctgggttttttgtcttcgaaaaggagcgttatgtatattgttaaaagttatgacgaactcagtaaagatgagttgctcgcaattttacgtgcccgggtagacgtatttgtcgtagaacaaaactgtccttacccggaaattgacgatgttgataatgatgaattaactcagcacgtatttttattcagagagcagcaacttgcagcctatgcacgttgttataagaaaaatgagcagtatagtgcatttggtcgtgtgctggttgcgcagcaatttcgcggtgaagggttagcgactaaactcgtgcaaatggcaattgatacctgtctagaacactggcctgataaagcaattatgattggggctcaatgctacttaacagggttttatcagcagtttggctttgagaatgtgggtgatgattatttagaagatggtattccacatcaagatatgtgtctgaggtagccaaatggctacctcagcaatgtgttaacttaacagtgagtttgcaaacacgagtgagatggcaagtgggcaaatgaacttgatataccatggccatactttccagaagaagctattcgcaacatcagggcagccttgctgaatttcttttaataaagatgctctatgccagatccagcctacaaaaatacagcacattaagccaagaattggttggccaattttagtggttaaagttattacaaagccaaatagcgtccctagattaaacactatcgtaaaacttatcagtgcaataataccgccgatgatccaagttgcttgcacacgctttaaagcaaagcgttcaactgcataagacactggggcttctagcattgaaattgatgaagttaatgcggcgatgctcatcaaagcaaagaaagcaaagccaacaaaaatacctacatctcccatacttgtaaacagggcaggtaatacctgaaacaccaaggtatcttcagaaagtaatgcgccttcaggcgaaaatatctgtacgccttgtgcctgtgctacatacattgcagggataattaataaaccggctacaaaagcaataaacacgtcaataagcgttacatatgcacctagcgatacgaggttttcttttttactgatgtatgagccataaataatcatcacacttgtaccgagcgatagtgagaagaatgcttgacctaaagcattaacaagtagctcaggatttaaaattgaagaaaagtcaggcactaaatacgcttttaagccagcaatagccccatcttgcgtcattacataaatgatcagcatgaacaaaatacctagcaatgcaggcattaagcgctttgaccacttttcgatgccgttttctacacctttcgaaataattgacacggtcaaaatgataaaagcagctgtgaatattaagtttcttgatagtgactgctcacttaaccaagtgcttgcttgggcttgcccagataactgtgcgacaggctctaaagtagcacttagcatccagcctgcaacaatagcataaaagcttaagataaggcccgcacagataatgccaccaaacccaaccataaatgcaaatttcttctgccactgatgattagtcacttttctaagcgaactgacagcattagcttgcccatgacgaccaataactagctctgccattaatgcaggataagctaaacaaaacgccagtactaaataggcaaccaaaaaagcggcaccgccattacttgctgtttgtgttgggaagccccaaatgtttcctaggccaacggcagagcccgctgcagccattataaatccaaagcgggagctgaactccccacgtgatgcgctcatattattttacttctctatctttgacggcgctgacaatctacttgaattaacatcaaataaaaagagttaatctaggtcaaattcgttctatatattgttatctttgaagtcagcgtacatttcgtgcaattgttctctacaatacgagacaattaacataattgaaacatgtttaaaggcttttattttgaattgaaagagtaaaacaagcgcctccgagctgtttgctctttgtaacgctgacagtgccgtggtgccagtcagcaactttagcgacaatggctaaacctagtccataactttcaccatctcgattacgatgagtctgctcttggaaaaatggactgaatactttatgccagttttttggatctattcccggaccatcatcttcaattgtaaaaataacctgatttccagcttgtttagcggaaatcagaatttctgatgtcgcaaaatcacaagcgttgctcaataaattaacgattgctctggctaaccagtgtagatcggcacatacagcgccaggttcgatttgttgctgaatgcgaagctgacgttgctccagtttaggttctagttggtgaactaaagtaagggtataactatcaagatctgactcattaaaagtgagctgattcgctttttgttctagtgtggcaaaagcaaggtagctttttagcatcgactccatttgatcaagatcttgctccatacgggcaaggtactccagacgtttttgttcgtttggactatcttgtgctgcctctaacccaaaccgtaaacaggcaataggtgttcgtatatcatgcgataaacttgacgccatcaacttgttttcttcaagtagcttttctatctggcttgccatgcggttaaaggttagctcgacgtccttgatataggtaaaatgtgatacatgaatgcggcttttcaagtcacctttagcaaaacgttgcgccgcgtcatttaacaccgataagcgctttgctaatggagtaatgataaaacccatgaacacacaaagcccagcataaaaaagcatagttagtaacacatcgttaccttgttcatggctatggtctttcattaagcgcatttttaaatggtgtggccctaagtttggttcactgtaaagcaagtaataaccttgttgatcttcgagaataagcccgcttggttgcgtaatttgtgcaagtaatgattgaggtaaagcaagcgattgggttggtctgtattcaagctgaacagtaaagtcatcattaagttgcttgatagcttgtgggcgttggctgggtgaaattgctgctaattgttttgcaaaaccttttatcatttgggtttcgctataaaaaacgtcatgaggcgtttgggtttgctgactgaacgcgtcaataagccaacccaaaatgataattgaaaggagtgcactgcctaataaggaaaggtaaaactttttcacacgcgtttactgccacgctgtcgaaacaagcaaatagcctttgccccagatcgttttaattttttctgggtgttgtggatcatcattaaactttttacgtaaagacgagatgagcacatcgacacttctgtctaagccatcatactctctgcctttcgtcgccttaaacacggcgtctcgtgataccacttggcctgcattactggcaaggtaatgtaataataaatattctgcacttgaaatatgaacttcatcttcgccaaagtacacagtacgtgattctgtattgatagtgagtttaccaacattgattgtggtactttctttgctggtatcttgcgagtcagttttagagcgcaatgcggcttttatgcgcgcgagcagagcacgaggacgcacaggcttcatcatgtaatcactagcacctacttcaagaccaatcacttcatccatttcttcgtcgcgtgctgtcagcatgataataggagcctgatagaactgccttaaatcacgacaaacactaatgccgtcttgtccgggcagcattatatcgagtaacactaagtcaggagctgttttacgtacctgctcaacaacgaggtcgcctcgtgaacaaatagtggttttataaccttgttcaattaagtattcggccacccaattggcgagtgaaatatcatcttcaactaataatattgttccgtaatgttccattatttactccaaacggttagaacagtcgccaacggcgtttcttttgacgatttttataaacccactgtaattgtatttcagtggtggcaacgactttgccgttgtcactattaataagttcaaagccaattgtttctgctgagtcgaattcgtagcgaaataaacccttttgttgcatcagccagcattgaatgatgtgtttgctttgttcgttgcgtaagcaataattgcctatgctctgttgttgccaactaatgtctacatcggcgtaacagcttctgccctcacgaagtgcaacacaggtgtcaggtaatgcaaccaaggcattagctttagtatcaacggattgttgttcttgcgcatgtaatgaggcagataacccgaacgctatgatgaaataatacttaaaagacatagcgcacgcctaccttggctttatgctgatactgttgtgaaataatagggctttggtgaatatcactagaaaaccaagtagacagccagcctgttaagaatacccaatgtctgttaagcggatattcggcatgaaattcaaagatcaggctgtaagaggtatcagggcgataaacagggcggtttgcaagtgcttctgattctgaaataccaaaataataattagtaaagtcttcagaataggcacttaagccaacaccagaacgaaactcccagtttcgccatggaattatttggctataaaacgaattcattacccagccattatgtgtgccggaaacatcttgtaaatactcaaatgaaatttgcgagttttcaaagcggcgagataaacgcaagccaacatcaaaatcgtaatttctattttttatccctgctagttcatcgatgacatcgtcaccataaaaggcgagaccagtttcatcaaaaccagattgaatgtttgtaccgactaaatcaagaccccattcaaacttgtcaatcaagctatagcccatagttaggccaccacttaattggctttggtcataatcgaggtaaaacttttcatacgatattgcaaggtgaatgtctggctcaaaaccatcattgtatgaatccatgcccactaggtaagagtcttcgatgtaataacccgctccaatgccccagtcccaagcaaagccttggcttggctccaaagtgttgtcagcataatagcgattactggcatggcttgatgcagcgaaaaaccacaagcaaagtactaaaatggtggcgtaaactcgcaatgtctcatccttgtttcgaaaaagtaatgtcgtaagaggatatagtatattgttatcgagttcctgtaatctgtaaaaaaatgtaggtgtgggcttagatgtgtaagaaagtgttacgagtactaaaagataggctgtttgtttatgggtaaaacaaacagcctagatgttattgtactttaattttatcgagcaggatgctgctgaggtaatattgcatcataggtgttagagcactaatttcagtgcgattacacggaccttgttgcttagttaatgaactcatacgcatcacagtttggtaaggcggtacctgtacttttttgttaatgcgctctagacgagcttgttcagtattttgtgcatgaataaagctggcaacttctagctcatttttaatagtttgctgttgctctacacgataaataagaggctcacggtgaaagctcgcgctgtcgattgaagattttgcaaaccagaccacatctccggtctttttatgcgttagacgcatgctaacttgtgccaaaatagttgcgcattgttgagttggatattgcgcagcaacatctgcaaacaatggaaatgctttatcgggcttaactagctgatattcagtatcatcaaccaaatctaaatcaagctgatgaatcgacaaagcgtaatcagcttcatcaccttctattacttttaattgtttttcgattaaagcatctgaaatttgtttataaagagtgtcagtaacactcgttttgtcggcaataatagtaacagtctgattctttttaacggcatgggctggcaattgaacagacttaactttaggagcttcgtgctctgtttgatactcaatttgaaagtattggctttgcagtgtcggtttttttggcatagttaaaagcggtgctggttctggttttaaagcgcaaccaactgagataaaacaaaaaatcaaaacaaaaagaaagcgcatatagtataatctacccataaaaaataaagattaagcgtattgtacgttagtcgaagcaaaagttcatgatattatgttatgagaaacttcctaaacgaatttaaaaaaaataactaatgaagtacagtttacgttttattcctttcttttttctccttcttattcagcttttttcaagtcggtatgcacttgctagtgatcagcaatggcaaacattcgtcaatgattataataaatatttaacccgtaagttaacaagtaaaggtatacctggcggttcattggcgattgtgaagttaggtgaagaagatttcatcaaagggattgggcgaacaaaaataaaggatggtcgcagggtaaaccaacatactcggtttcgtttagcttcagtgtcaaaaacttttgcaggctcacttactgcaaaacttgcggcacaaggcgaatttaatattgatgatccaattagtaaatttattcctgagttttcaaataccgtctacaaagatgatttaaaaatttatcatatattgagtcattcaagcggcttggtgccaaatgcctacgataacttaatcgaatcacggatgagttatcccgacattgttgaacgtttattagcagtagaaccaatttgtaagcctagtgagtgctatggctatcaaaatgtgatgtttagtttaattgattcagtaattttaaaatcaactcaaatggattattcccactggatcactgaatatatttttgcgccactaaaaatgaatgatgccagcgttggttttgaaggcatggtaaaagatgaaaactatgcgcatccacatgtgcgtggcagaaagcgttggtatacatcacgtttaaagaaaaattattataaggtgccggcggcagcaggtgtaaatgcaagcgccagtgatatggcaatatggctaaacgcccaattagggcaattccctgatgtgctgccattggatgcgctgatcaaacaaacacgcccttatacgcataccaaaaaggaaactcgccgcagagtatggcgagagcacgtaaatgatgctttttacggattagggtggcgtatttatgactatgatgacgaagtactttattaccatagtggctgggtgcaaggttatcgtagtgatcttgtggtgtttccacatttgaatattggctttagtttagtgttgaatgccgaaacgggtttgattaatgaattaaccactgagttcattaatcgggtacttaagtacactcgtgcagaaaaatagcaagcggctcatgtttggttacaaaataaaatcgattcagaaatagaaaagccagcgagtaacgctggcttttatttttaaattgccgatacggacttagccgcgtggtaattgaatttttttatcttcgctttgacgatacagtacaattgtgtgaccaattgtttgaagcttctctgatttagtctcgcgaacaatcgcatcaaaaatcaatgctttagtttcacgatcatcagtaggtaccttaaccttgattaattcgtgaatgtctaaagcgctgtcaatctcaaccaaaacaccttcggttaaaccgttagcaccaagtaatacaacaggttttaaactgtgtgcttgaccttttaaaaactgcttttgtttgttcgataatttcatgttgttacaaattttgctgaatatggcttgaattaaaggtattctaacgccatctagagaatattactaattagttacgtattaattttatggcaaataaaaaacattcagccagttctaagcgttggctgaaggaacatttcgacgatccttatgttcacgaagcgcaaaagaaaggctggcgttctcgtgcggtattcaaattagacgaaattcaaaacaaagataaattaatcaaaccatcaatgacggtggttgatttaggtgcggctccaggtagttggtcacaatacttagcagaaaaagtaggtgataatggtcaagttattgcgtgtgatatcctaccaatggattcgctagcaggtgtcgactttttgcaaggcgacttccgtgaagaagctgtgcttgatgcgttattaactcgtattgacggaaaaaatgttgatgtggtgttttctgacatggcaccaaatatgagcggcaatacatctgttgaccaagctggtagtatgtacctagtagaactcgcgttggatatgtgtcaccaagttttaaagaaaaacggcgcattttgtgtcaaagtattccaaggcgaaggatttgatcaatacttgcaggacgtacgtaatagctttaaagcggtaaaaattagaaagcccgatgcttcgcgtgcccgttctcgggaagtttatatagtggcgacaggctacaaactgtagtacagttgtgcagcgttaagttgaatttaaattaattggatacaagaggttaaccccttgagcgatatggcgaaaaatctaatactctggctggtcattgcagtagtgctaatgtcagtgtttcagagctttaatggtggtgatcaagttgatcgccaaacaagttacactcagtttgtaagcgatgctcgtagcggcgctattcaagaagtttcaatcgaaagcacaacaggtactattactggcaccaaaacaaacggtgagcgctttcaaactatcatgccaatgtatgataaagacattttgaacgatttattaaaaagcaatgtcaatgtgaaaggtgtaaagcctgaagagcagtctttcctcgccagcattttaatctcttggttcccaatgctactgcttattggtgtatggattttcttcatgcgtcaaatgcaaggtggtggcggtaaaggcgcgatgtctttcggtaagagcaaagcgcgcctgatgagtgaagaccaagttaaaactacttttgctgatgttgctggttgtgacgaagcaaaagaagatgtaactgagctggttgacttcttacgtgacccatctaaattccaaaagctaggtggtagcatcccgaaaggcgtactaatggtaggtcctccgggtacaggtaaaacgttacttgcaaaagccgttgcaggtgaagcaaaagtgccgtttttcacaatctcaggttctgatttcgtagaaatgttcgttggtgttggtgcatcacgtgtacgtgacatgttcgagcaagcgaagaaagccgcaccgtgtatcatctttatcgacgaaattgatgcggtaggccgtaaacgtggtgccggcatgggtggtggtcacgatgagcgtgagcaaacacttaaccaaatgcttgtagagatggatggttttgaaggtaacgaaggtattattgttatcgcagcaaccaaccgccctgatgtattagacccagcgttattacgtcctggtcgttttgaccgtcaagttgttgttggtttaccagacattcgcggacgtgaacagatcctaaaagtacatatgcgcaaagtaccactaggtgacaacgtagaagcggctgtaattgcacgtggtacgccaggtttctctggtgctgatcttgctaacttagttaacgaagctgcgctatatgctgcacgtggtaacaagcgtgtagtaagcatggcagagtttgatgcagcaaaagataaaatcatgatgggtgcagagcgtaagaccatggtgatgagtgagcaagaaaaagaaatgactgcttaccatgaagcgggtcacgcgattgttggtcgcatggtgcctgaacatgaccctgtgtataaagtatcgattatccctcgtggccgtgcactgggtgttactatgtacttgccagagcaagaccgcgtgagtcactcaaaagagctgctggagtcaatgatttcgagcctttatggtggccgtatcgccgaagctttaatctatggcgaagataaagtaacaacgggcgcaagtaacgatattgaacgtgcaactgatattgctcgtaaaatggttactcagtggggtctaagtgaaaagctaggtccattactttatgctgaagatcaaaacgaaatgtacatgggtggcggtggtagccgtgctatgagcatgtcagatgaaacagctaaagttatcgatagtgaagtgcgtttgttctcagaccgtaactaccaacgtgcagagcaaatattaaaagataacatcgacattcttcatgcgatgaaagatgcacttatgaagtacgagacgattgatgcgggtcaaattgatgacttaatggctcgtaagccagttcgtgaacctcgtgatgttcatgaccgtcgtccagatgacaaaaaatcttcggctccgaaagtagaatcggcacccgaagagacaaaaagcgaagattcagtaaaaaaggatgaaacaaaccttgatgacaaagctgaataatcgctaaaatagaaaaagcaaaagccccgcatgccggggcttttttgtagcagaaaacaatactgtattttttgccatggaagcagtaaaggtgatcgatgaccgctattaaattaccccgaggtcgcactttacacctcgacgaccctattgtaatggggattttaaacgtaacccctgactctttctcagatggcggcaactactgtcagctcgacagcgctgtcaaacaagcgcaagctcttctaaatcaaggcgcaaaaattattgatattggtggtgaatccactcgcccaggcgcacctgatgtgtctttagatgaagagctaaaacgcgtaatcccattggttaaagcacttaggcaaagtagcgattgcattatttctatagataccagtaaaagcgaagtgatgcgtcaagcgattattgccggtgctgatatcataaatgatgtaagagcgttgcaagaacctggggctatagatgtacttgctgagtacccagatgtggctatttgtttaatgcacatgcaagggcagccacgaactatgcaaagtaatccggtatatactgatttatttgcagacataaatcgtttttttgccgagcgtattgcagcatgcgagcaagcgggtattcagaaacatcgaattatactggatccaggttttggatttggaaaaacactggctcataactatcaaatccttgataggttttatgagtttaatcaatttaatctaccagtgttagcaggcttatcacgcaaatcaatgataggtaacttattaaaaagaggcacgagtgagcgtttagcaggtagcttagcgggagcattaattgcggcccaaaatggcgctaaaattattcgtgtacatgatgtattagaaacagtcgatgtgcttagcgtatggcaagcatgtaagaaaggaattacaaatgagtaaaacaagaaaatattttggcacggatggcgttcgtggcatggttggggagtttccaatcacccctgaatttgctttaaaactaggctgggctgctggtcgtgtactatcaaaaattggcaccaagaaagttataattggtaaagatactcgtatctcaggttatatgctggaaacatcgcttgaagcaggtttaattgcggcgggtattgatgttgttcttttgggccctatgccgacacctgctgttgcttatttaacccaaacattccgtgctgaagcgggcattgtaattagtgcatcgcataatccatatcatgataacggtattaaattcttttcaagcagaggattaaagctacctgatgaagttgagcttgaaatagaagctatgatggatgagcctatgacctgtgttgcctcagacaaactaggtaaagctcgccgcttagaaacagcggatggtcgctatattgagttttgtaaaagccaatttccacaaggcctgtcattagaagggttaaaaattgtgcttgattgtgccaatggcgctacataccacattgctccttcggtaatgcgtgagctaggcgcagaggttatctgtcatgcttgcgagccaaatggggtaaatatcaacttagagtgtggtgcaacccatgttgaaactcttaaacgcaaagtattagaacataatgctgatgtgggtattgcttatgacggtgatggtgaccgcgtaatgatggttgatcataatggcagagtttttgatggtgatgatattgtttacatcattgcatgccaagctgctaatgacgatattctaggtggtggtgttgttggcaccgttatgtcaaatatgggcctagagaatgccctaaaagcgcgcggcattggttttgctcgtagtaaagtgggcgatcgctacgtgatggagcttttacaagaaaaaggctggaaaattggtggtgagagttcaggacacgtattgaatttagacctgatcagtacgggtgatggtattatctcgagcttacaagtactcgcagctatggtcgcgcaaaataaaacattacaagacctcggcgctggctttacaaaatacccaatgaaaatgatcaacgtacgttaccctcagggcacagatccaacacaagctcaggctgttatcgatatggttgctgaagttgaagcgcaactaggagatacaggacgagtgttactacgaaaatcagggactgaacctgttgttcgcgtgatggttgaagctgagcaggagaaaattgtacttgatagtgctcaaaaaattgccgcagttgttgaatctgtgagcaaacaaaccgtggtataacaataacctcttgtaacttagggcaagtcgagttagtatcttgcccgctttctaatgtggagtggaaatatggcagcacgtaagccgatggtagcaggtaactggaaaatgaacggctcattagagcttgttgaacagctatctagcgctattaaagatgttcaatcggatgaacttgatattgtggttttcccaccattcccattaattaacgctgtaactcagcaagatgttgtggttggttcgcaaactgtttctgagaaccaagcaggtgcatttaccggtgaggtagatgcgcaactggttaaagatttaggtgcaacatatacacttgttggacactctgaacgtcgtagtatttatggcgaatcagatgaggttgtggcatataaatttgctcgtgcgcaagatgttggtttaacaccggtactatgtgttggtgaaagtgaacagcaacgtgaagcaaatgaaaccgaattagtggttgcagcacaaattgatgctgtaattaacaaattaggtgtagcagcactgaagaattctgtggtagcatacgagcccgtttgggccattggcacaggtaagactgcctcacctgagcaagcgcaagctgttcataagtttatccgtgagaaaattgcttctttagatgatgacttagcacagcaattaaccatcttatatggtggtagcgtgaatgaaaaaaatagcgaattattatttgcacaaccagatattgacggtggcctaattggtggcgcaagtctaaaagcagactcatttactgcaatctgcgaaagtgcaaaagggaccgtataagatgtacgaaattttattagtagtttatttaattgttgctttagctctagttggtatggttttaatccaacaaggtaaaggcgcagatatgggttcatcatttggtgcaggtgcttctgcaaccgtgtttggctcatctggtgctggtaacttcatgactaaaacaaccacaatcttagcaacaattttctttgtgctaagtattgttctaggcaacctaacagctggtcaaattaaaaagactgatgagtgggaaaacctagaagctgcgccagctgttgaaactgttactcctgcacaaaacgatgtgccggtaacagaagaaaagagctctgacgtaccaaattaattggcttaggctaatacctgttaagctgttttcattcctcaagtaaacaaaaagcttaacaacatacagaattgtatgcggatgtggtggaattggtagacacgccatcttgagggggtggtggcttcggccgtgggggttcaagtccccccatccgcaccaaaattaaaaagccgtaacacagtgtgttacggcttttttcgttttagtgctttatacaacacacgatgcacttttttagtgccattattctaattttatatcgttattttttatatcaagctgattattatcgctttttaaacttggagcacaccttgcttacttagttgtatctattctcttaaggatacaatgatggcgagaatgagttatctcagtgcaattgagcgatatgaagaacaacaattgctgatacacaatttactactgtctattttagcgagtgtgcaagcttcaatcaccaacgaacaagactatcagcaacttgtaaaacagtatccgttcttagagttacagtattgcttaaatgagcaaggtattcagctcggtgataatgtctgctttaaacgtcagtacaagaagcatttggcgcataaaggagcagggcaggatttaagcgctaggccttattttttattagtgtcgagcgcacctgaggcacatttcacctctccttatatctcgacagcaactaggcatttatgtatttctgcaattaaaccggtcgaaaagaaacaagggggccattattttcttgtgatagatgtctgcttaactgagctggttgaatttattatgggtgatactaaacgtgcaagcatgaccgcttactttaaagctggctacggcttaattgttggttgtttgttttgtttagtcttttatttactctatcaagtattcatcggtatgctagaactgttaatgagtgagcagcctcattctgatccattaaaaccttttacaatcatcattttcgttactcttgcattagccatttttgatttaggaaaaacaattctcgaggaagaaattttgatgcataaagatatcttccgccatagctcgactcgccgcactatcacgcgttttatttcgactattctgattgcagtatcgattgaggcattattaactatgttcaaggctgcgcttggtcaaactgagtatgttattcctgctgtgctgatgatgtttgctgtggcggggctgttattggctttagctatttatgtttatttaggtgcaaaagctgaagacgtgctttcgcacgtccagcgtttaaagataaagcattaattaagggcaaagacttttatttttaaagcgtcccgccaatgccaatacttgggtttacatagacaggcccaactttaaaaggggcattaatatcaaggctagcataaggtgtgcatgcatttagtagcactaaggtggctgctaccgtggctatttttagaatgcgttttttcattacatttgctcctgaattacaatacctgcgccagcaggatcacgaataatggctacactgccatttcgcacttgttgagtcggcgccataagaactacaccacctgcggcttttactttaaggagtgtgtcggaaatattggcaactttaatgtagttaacccaggtattgccaatgttagtgtcaggctttttaacaaaaccaatagccggtttattatcggctgttagatatttatagttattctcacccagtgttttagtctgaacagaataattgccaagcgattgataaaaagactgactttgctcagggttgtcagtccagacttcttgccatatccaacgattataactgtatgtagcagctgggtcaccattaactgtgttgatcaaagaaaataccgcgccttgcggatcttctaatactgctatgctgcctcgtcctttaatttctgtactagcaattaaaactttaccgccagctgtgactgttttttcgcttattgcagcgatattgtcagtacttaacatgctcagccaatgactggcattttgcttattatcaagctcagccatacctgcaattaattgaccgtctgaggtagcgagtaaatagctgtcgttaacctgcttaaactgccaaccaaacacatcgccatagaaggctttagattgtgctaaatcaggggtaataagatcgtgccaaactacatgaccaatatgcttggtacctgtatcgctaatagcaggtagttcgctagaggtgagttgacagcctgttagtgaaatcgcagtggctgctgctaaaatggcaacacgcaaaggggtaggtaatttcaaagtttgctccttgcaaaatggggtcaactaaaagcatagactatttattgtttgttattcaatcaaaagtaagaggagttaatgaagatttaattgcttttagctaagcgctacaggtttactttctaaaaattttaaccttgtctgtttgcatgcaaatgaatggtgagatcaaggaaggagttgttttgggtaaaattatgctatttgtaatacatattaaggaggatgttatttaaaattaataaaaaataaaataattatacatgttttcacaaaactgacatataatacccttccagaggaaagatgcttgtagctaagcgtctttttttatgcctgaaatttatgggcgaaaatacacacacggtatcctttggagttttaattgaaattacgtcatctctcacagttaactgtggccattgttgctgcattatctacttcagcgtttgctgagcaagaaaaaacctctgctaaacaagatgctttcgagaaaatcgaagtaacagcgcgtaagcgtacagaaagcatttttgagtcgccaacagcggtgacatcaatcggtgaaaacctgattgataaagcaaacatgagcaacctagaagacattggtaaatacgtacctaacctaaacatcacccgttatggtgtaggtaatgcggcccatgcatccgtgtttattcgtggtattggtttacaagaccacgtgatcacaaccgatccgggcgtgggtgtttacctagacggtgtttaccttggtcgccaaatgggctcaaacttatcattaccaaatgttgagcgtgtagaggtgttacgtggtccacaaggtactttgtacggtcgaaacacattaggtggtgctgtaaatattattactaagcaaccaggtgatgacggcattgtaacgacaacggcaaaagtaggtagccgtggccgtttagccggtgacgtttactttaataacagccttaccgacactgtaagcatgtctgcaagcgtgtcttataagcaacgcgatggtgtaggtgaagcaattaaccttgcaaacccagaaaaagaaatcggtgaagagcaagagttaagtggccgtatggcgcttaaatggcaagcaagcagcgacttatcttttgtgttctcaattgatggtgttgataacgaatcaggtcaatcgccatatacaattgaattaacggcaccacttgatccgaatgacccgttcaatggtgatttcccattactaacagaagatatgttaccaagcgatcctgatgatttagcatcaacggtagcaggtattgagtcgacagcttactcaggctggggcacgtctttaaccgctgattgggacatcaataatacctacacagctaagttcatcaccagctaccgtagctcagagtatgaaggtggtcttgatgatgacgctgtagctcttaacttatctgaattccctgaagaaggtggcgcagatcaatattcattcgaaatccagttaaacggtagcttcgaaaacatggactttgtgtctggtttgtacttctttaatgaagatggcttcacaagttctggtccgttcgtatttagcccattcaacacaccagatggccttttaaatgatggtactaccgcgtcgtttggtgattacggttactttgatatcaaccaagagactaattcatacgcggcttatatcaatgcaagctatgacctaagcgacgatttaacggtgggcggtggtctacgttattcgaaagataaaaaagaagccgatgccttgttcccaacgtttgcgacacgtaaatacgtaagtgctgattttgatgcagtaacatgggatttaaatgcgtcgtaccagcttagcaataacatgaacgtgtatggccaaatccaaaaaggttatcaaacaggtggtttcccaccgcgtccatttggtggtcctgatcaatttgtttctttcgatgaaaccaaagctattaactacgaactaggccttaaaggtcaggtacatgaagatgtatctatgatgcttgctgtgtttgttactgactacacagaccttgcattaccattctcagatccaactgcaggtggcggtttcgttactatcgtagaaaatgcgggtgaatctaaagcacaaggtatcgagcttgagacaacaattgcatttactgatgactttacgctacgtagtgctattggttacctagattcagaaatcacagaagtagatgacggtgtattaggtattggtaaaggtgattcaccagcactaacaccacgttggactgtgatggtcgcaccttcttatttcattgatttaagtaacggcggcacagtggcagtaaacgcaaactactcttaccgtagcgatatgcaaggtcaatcagttttcaaccaaagtgaacacattgattcacgtgaattagttggctttaacatctcttacttaaacccgaacggtgactttgaagtgactctttacggtgagaacgtgttaaacgaagtttatgatgtaggtcgcttacaacaatctggctttgttggcgtgatgcgcagcaacgaccgcagcgaatttggcttaaaattcaaaaaagaatttgagctttaattactaacaaaaaagggcaagtaaatacttgccctttctttttaattatttttctcttgttcgcgcttttcgcgcgcttctcttaattcttcagccagttcttttgctttttgcttggttttttcggtaagttcacctgctgcttctttgctttcaatccatgcgtctaaggcaatttctttaccgtcgtcatacatgtttaagcccatttttttactctcttcgagtaattcttgcagcgagtcatcattaaactcattggtggcgtcttttacgtcgccccaagcgtcattaagagcttgctttacttcttcttttgcttcgctagcatctttctttgcttgctcggcatcgtcacatcctgttaaggctatacagcctaataaaactaagcttgctaattttttcataattttctctaatggttatccaactccacaagcagtataaacaaataaaaatgaacatagctagaacaacacgtttaagttttcgattaatggatggcaatgatgccgagcttttatatgagctcgataacgacccagaggtaatgaaatatctaactcgtggcaaaatatccagtatgcagaccatcaaagaggtattcattccacgcttgaatgcatatcgtaatgagcaaaaagggtgggggctttggcaggtaaatatcatcgagagcaatacatttatcggctgggtattagtacggcctatgggcttttttgaacagcctgattacagtgatttagaaattggttggcgctttaaacaaatgagctggggtaaaggttatgcgtctgaggcagcattagctgttgcccatgcggtatgtcaggatccaacagttaaatcgctctcagcgacagcactgaaggataacatcggctctattaaagtgatggaaaagctggggcttaaatttattaaaaactataaccatacagatgagcacggccaattacctgcggtgctctactcttgtccaaaagagcaattaacaccatttgaacacaactgattgacccaaccagctttaacatgcgtaaatgggtgaaagtttcatcaataaaaaaggaagttctatgactcatatagttaagtatgcagcgcgattatgtttcgtagctgtattattttgtcatcagtcactacttgctaagcaagcagctgtggctatgcctgatagttacagcagcgacaccgctcgtgccattttagagcagggtggtaatgcagttgatgcagcaattgctgcacagtttgtgctagcggttactttacctgaagccggtaatattggcggtggcggttttatgctgatccaaaaagatggcaagggtgattttattgattaccgtgagactgctccagctgctgcacacagagatatgtatcttgatgaaaaaggaaatgtcatcgataacatgtcggtatacggtattcacgcaagtggtgtaccgggcagtgttgcaggtatgtggcttgcgcatcaaaagcacggaagtttagagtggaaaactctgctagagcctgcagttaagttagctgagcaaggttttgtggttcatccaaaattagccgccagtattgagcgttacattgcgcgaatggctaagaagtcggttaacattaacttttcagattactttgctgatgccaaagcaaacaaggttttcaagcagccagaacttgccgccacattaaagcgtattcgtgaccaaggtaaagcaggcttttacgaaggtgagactgcgaaaatcattgcgacgtttatgaagcaacatggtggcattattactgagcaagacttaaaagcttatgaagctaaatcgcgtacaccaattaagggtaactggcgtggttacgaagtgctcacatcgccaccgccaagttcaggtggtattgctattttacagtggctaaaaatgtacgaccttgcaaagccaaaaggaactcttgagcacaattcaacaacctatgtccatattttggctgaagtaggtaaacgcgtattcgccgacagagctgaatatttaggcgacccagatttttatgaagtgccaaaaactgcattgcttgcagatgattatctcgccaagcgagcaagtacaattcgtccagatgccatttcaactaccgagaacatcaaacctggtttacacgaaagtgaacaaacaacgcacttttctattctcgataagtggggcaatgcggtagcgaataccaccacgataaacttgagctttggtagtggcgttgttgtttctggcgcaggatttattttaaatgatgaaatggatgacttcagtgccaagccaggtgtgatgaatgtatttggtgcaattggtggtaaagctaacgaaatacaaccacataaacgcatgctaagctcaatgacaccgaccattctacttcaagataacaaagttaaaatggtaactggttcgccgggtggcaccacgattattagctctgtgtatgagtctattttaaatgccattgaatttgatatgacagccgaacaggttgtagatagtcctcgttttcatcaccagttatggcctaaaaatgtgattcgataccacacaggtcttgaaccaaaagttgttaaagcccttgagaaaatgggttatacacttgatgagcgccattttggtgatttacatgtgatcattaataaagacggtaaattagatgcagcctctgaagcatctggccgcggtaaggcgatggttttttaatttcaccttaaaccagacacaaaaaaagcacccgcgggtgcttttttgatttgattagttgtttaaccaatagctggaataagccccgccatttgtaaaccttgagcactaataataagcacaccaaacaaggcggccagtgctaaaccaatattaccgcctttgacttgataacccgcgtcaggtttgctgcttcgttgcttatagaccatagcaaccggtaaaaacaccgctaaaataaccagcgcaatggcagcgtagccaagtgccataataaacccttgcgggtaaaatagcgcaaagcctagcggtggaataaaggtgatcaaggctgttttgatacgatctttactgccatcaccttttttaaatgcatcggcaaaaaagtcgaataaacctaaactcacccctaagaaagacgtcgccaacgctaaatcagcaaaaatgtttactgctgtggcaacatgcgggctgtgagcaatgctagcaacactgcttacgaatccaggtaacccttggctttgtagtaaatcgctttgactcatcatgccttggctaagtaactgccaaaaaatgtaaatcactaaaggcagggctgcacctgccaccatcactttacgaagtgttttgatatctaaacccacgtatttcacaatcgacggaatagagccatgaaaaccaaatgaggtaaagaccactggaattgcagataaaatcagaccttgttcaatcggcatttcaagtaagtgttggccgtgaacataaggtgtcagcatataaaataagctcgctagtacgcacactttaatagtgaaaagtacgcggttaagtttatcaactttactagtgccgagcgtaaccaccgtacctattaccacagccagaatgactgaaccaacttgcggtgctaaagaaagcgataatccagagttaagcttttcttgtaattgtgcaccgccacctgcgatatacgccgcgcataatgcgtaaaacaaaaacatcactgaaaagttagccacccattgtccacgtttacctagccatgatttagctagggtattgagggtcgcatctctgtcggcatattgatgtagctctagcatcaataatgctgtgtaggtcattaaaatccatgtaagtaagataagtgataacgctgttgtgaaaccaagccctgctgaggcgataggcaatgccagcatccctgcacctatggtggtgccagcaacaattaacatgctacctattgttttatttttaagcactttttgccccttaaacttcgtgagaggcaagcaagatataacttgtttaacaaaacttaaatagttttgttataaatcaaagaaattaaatgtaacttatgatttacatgtgcaaacaggccgttgaaaacgcctagaaactttatgaaaaattgtctgagttttagtgttgacaaaatcaccatttgggtggattcttaagcttcttcaacttactttttaaataccatgatgcagctaaaccaacgaccaacaaacaattgtatgcgcctgacctcatcagtcgtatggtctgttatgtgctgcggttaattaagtaagttttactaaccgcgtcctaagcggttggttatttctcttttaaattctcttccgcttttttcgcctttttaaaggaataagcttgtgcctgttaaagcctcatattttttaatggtggtgatttggtcaacaacaccactgggtattgtttggagtagtgaaacggtagcgccgaccctagccgtgtttttacgcatgctggtgggactggtgttggctgcctttgtcgttgctgtggctaatatccgagtgccttggcatcgccgcgctttgttcctctatggctattcgagcattggtatttttggtggcatgttattaagctacatggccgctaaaacggtgccttcagggttaatctcgttgatgtttggtttagcgccaattttgtcgggcttacttgcgcaaaagatcttgaacgaacctaagttcagtgcggttaagcttggcgcacttggctgtgccttaattggcttatttttagtgagtcagcgccatattcaaggtggggtagagcagcttagtggtctgctatatgtatttatggcagtgtgcttttttagtttaagtggcgtgatgatcaaacgggtaagaattgctattcacccaatggccaccacatttggtgctttggtatttgtaacgccactgttttttattacttggttgctggtagatggccaactaaatagtcagttgtggagcgcaaaatcactgtactcaattgtttacttaggcgtgtttggttcattaattggtgcactggcttattttcatgtattgcaaaaattgaacgcgagtacagtagcattaacaaccttgatcacaccgagctttgcaattgctataggcggcttattaaacgatgaaccaattgatcaagagctggtaattggtgcaacggttattatgataagcctagcgttcttccagtttggcgataaatggataaaacgttttaaaggtattaagccattagaaatgggttaaagcgagtagccgcaatagcggctactacattttagcaatttgaatcactaaacggcggtttgtgttccggccaagaatgttgtcgttactggcaacatggcgtttttcaccgtatccttcagtatcaattttattttcatcaatacctaagctaactatatagtctttaatcgcttttgcgcgctttttagataattcgaggttattccagcgaccgccgtaactatcggtgtaagacgagattgatatagaggcaatactcgtatcgtactttaagtattcagctattttctctaagcgcttttgtgatgtcttagttaagttgctgctgtttggttcgtaattcattacagtgaacgaaatatcttcgaaactgtagggcaacatggcatcgcgacattgtaaaaatgcccagtaggcttgcttgaagttaacacttgataagccaacggcaattttgtcggcattgttttgccagtcttggtaataaaatgtcggttggtaacctttttcaagttctgtgagcatctcccacgcagttttattacccagttcgccgtcaaactttcgtaacagcttcatattagctaaatcacgggctgggatgcctgcacgccagtgtggtggcactgcttttaagccagcaatgctgtagttatctggcctaacaaccatatcaagattaaagttaacgtctttatttttactggccgtggtgctaaaaatagcctcaccatagtaaggaacttcatgatttaattggcattctaagcgagatgttttaaccatattccagttagaagtatctgctgttgcagtgtactcacgcatagctgcgcttgtatgtgtggcagcaaatagcgacataaggcttaaacttaaagggagtaatgaaaacttcatcacggtaaatctccaacaaatcatcaatgccaattaattggcaagtttgtgtgctaaatagttaaaactgcatagcacagcgctagctgattagtttaaagcaaataatgtgcctaaaaacttgttaagaatatacgatttcagtgtattacccctagcagagcagccgtggtttttgacataatagtcagcttacactggcaaaccaagaagactatggaaaatactgaacaaactcttttcgcaaaacgctttcgtggcttttttcctgttgtgattgatgttgaaactgcaggctttaataaagacaccgatgcgctattagaaattgccgcatctgtattaaaaatggatgaacacggtgtgttaagtattgatcacacagttcattttcatgttgagccatttgaaggcgcgaatatcgagcaagcggctattgagtttaatggtattgatccgttttcagctttacgtggtgctgtaccagaagaagaagcgattaaagagatctgtaaagttgtgcgcaaggcacaaaaagcagcaggttgtcagcgttcagtggttgtagcacataacgcagcgtttgatcatggctttctaaatgcagcgattgagcgttgtaaaattaagcgtacaccatttcatccatttgttagctttgataccacttcacttgcagggcttgcgttagggcaaaccgttttagccaaagcatgtagagctgctggcattgagtttgataacaaacaagctcactcagcgctttatgataccgaacgcacagccgagctattttgtttgatcgttaatcgctggcagcaacttggtggttggccgctaccagaaaccgaagtaactgaagaagaacaagactcagccgctaaaacgactgagtaatttttccttcaacatagcgcagcatattaggagggtagatacgtgaaaactgtttactctcttgcgcaatcttaagctccacccctgggtgcatcaactcatttactttaagcctacttgttgctagtaatcgtgaaatttttagtttgaccaaatgctttttctttttcgtactggccgtttttaacttaatttgctgctcacttgcagtaatcttattaatgtaatgagcccgttgtgttgcatctgggatcttgttggcttttttgcgtgcttgctgtagggcagcggcttttgttgctaataatttttcaaagtcattaatttgttgctgcttttggcgtaaatcatgccagtactgtgctataaaaacacgagttttggtgcctgatggcgcaccaagctcgcctgtttcaattcgcatagcatctaaaatattgccaccaataattttaccgcgaggattgttcgctttgcccacacgaataagtcgtctagcacttaaatcacagtgcaatgcttggcgctctataaacagatcttgctgtgttttaatgtggcaatattgagcataaccaacagaaatagtgcgctcggcggtaatattgcaagtaaaggaatctgcattatcacgtttacgaccaatcgcacctagcataattgtcacttcgctcttgctttcaatagtcgctgattcgacaaaacctaagactgtaatatcgcccgttgctttaacgaacataccatctttaacatcaccactgataataacactgccatcaaactcaacatgacctgtacttacatcaacatgatgaaaacacaatacatcatcaacacgcataccacggggtagggcaacaggcacccctttagcatccgcgatcagcatattgctattagctgggtcaattcgtgtgccttcgaatggttcaagagggagatcttttccgggtttagcgggtaaaacatcaccaaatacagtaaagccatcttctccaccggttgcaggaactcgctgcattaacggcgtcccaggcttaactgtgataatggcacctaagttgcgcatatccactttaccgccagtggtttcttgtgggcttaatacgcggtcttgtgctgttgagcataaacgcacgaatttagcatcagtgccttctttgggcattctgccatgtgcaataatagcggagtaatgggcgccggggggctgtttaaattgttgccctaaaaatgtatcaagcgcacggatactaacaccttttacaacaccggcttcagccagcattgctttagcacagtccatgctgataatttttccaccgcgggcagttgttatacttgcttcaaccaccatgtttttttcatcaatgctaacttttaactttgcatctacagctttagcaacaatcaaagactgagtttggtaatggctacttggcgtgaatagcttgccgatattggcatctactaactcaaaattagcataaggcgattgttcaatcgcttctatcaattgtgcactattgataggaaaacccgcatctcgtgggtgttcttgcaaagagacatcaccactttgcttatcgaaggtaaacatcgacatttagtaagtcctgtaaaatacggcttgttattatagttatgtgttgctacaggatttttatagtagaggtaacaacaacccccatttcagcacaacttttgtactatgttaagataatgtatgcattaaatgtaaaaatatgtataaaaactgatatttcctgtttgaaatttcagcattcaaagggacttagcaaaaataacctcattaatgccttgagtaaaaacgacttactcagttatactgcttgcacactctgaatgagataccaaattcaggggctgattaggattcgacggaattcaagacgcccgaggtgcatgtcgaggtgcggttggcctcgtaaaaaagccgcaatttaaagtaatcgcaaacgacgataactacgctctagcggcataatagcccgctagcacttctccggtgtatgtctgtggacccggttctgaagtgtcaccctacacagactcgctgcggaaaccctggccggggttgaagggctaaaactaagcggcctcgcctttgcagatcgtgttcgtccgagctgtaaaggttaactaaaagacgatactaagcatgtagtaccaaaggtcgaggcttttcggacgggggttcaaatccccccagctccaccaaatatgaaaaaggctgctctcggagcggccttttttattgtctttataaatcaaattacccattaaggtacttaaattaaggaccagatttgttggactattttaacgagagttatttattcctaaatcacttgctatggagtttaaaagtaactcatacgattgtttgtgagtcggactttccatccctgtaaatctattactccaatcttcttgccaagagggcagagatcttttttgtcctgggtcatcttttatacgagcatctgtaacctctccttgccaaagagcaaaagcttccctatccatatagtttaagtacaagttaaatgtttcaggtgaccaaaaagctttatgtgaatgcattttagtattcaaatatctgcgatattttaagattgtttctggagtcatatctttatattcgcccacctcttcaatatagcaatatatattgtttagctttttgccaatttgttcgtatatttctgctctctttgtgattataattttatttaaactaaagttatgattgctttcctgtagtgtcatgttagttattaaaccaaaagaagctatggaaattggcatggcaattccgacaattagttttgctatttcgaggctattccaaactttatttttcttgtccactatatactcctttaaatagtaagaagtttgcaacttatgttgtgaagtaacttaaaaataagtgaattctaattttttctaagataaagctccccattttcaacaactcttgttggtattgagtgtctatctaagtcaccattaattgtaaaaagtagatcttcgcaaaaataatcatcatagaaatgccaagagtgtgaccagttagcattacttttaactttttccaatgttaaccagtgcttctctacattgacatttactacattggaagggctgttatcaggtaatccaacacggccaactcgtggttgcgtgccaaagcgtttaacatttgaaagctttaaagcagagtctcttggattttggtaattagtaattcttgtcgcatgagcaaataaagaactggattttttatcatcgctttgcattgattttcttgaaatatcgccaccaataatagctacttggctgacattccaatttatacgctctagctttctgttttggtctgctttgtagaatgcttctcggattacataagcaccagtactatggccaagcaaatggatatctacatcgcacttcagattattctcattagcttgattcatagctaaaagcataatgccgtcttttactaagctttcagctgtttttagagcatcgcttcggtcttctaagtagtttagtgcagcgttagcgctgggccaatcgaaactaactatcgcacctttaaaccctagcttgtttaaattcttttgtaataagtcatggcgaatcataatatctttaatactattattatatccatgtacaaatattaggatgtcaccgtaggtatacccttcaagtgggtgtcccttggggtgaactcttttcctattattagttgctctattaattactttttcaagccagtcacctctatttaaagctgtttcagtagggtgggggttaaaatttccatcatttacttctaaatatctagtagcaccaggttctgaaataaaaaactcttttttacctttctttttggtatctctagtacatatgattaaattcgaaagcataattataactccttttatattggtaaatataaaagttgtttctgttcgctttttaatcaagtttttagggtgttttattattaaaataagtaatatttatggtggagttgtagctttctataaaaaattctagtttctttttattagatttgttaaaaccgcttttgagttttatctgggttaatagggttgttttttattttatttttaatgatttagttttgggtgccttcaactcgaagacacctttgtccagttacagcgtttgtttcctaaacaaccaactgaacggcatcaataatcggtttgttttctatatctatggtgtcgatgatgtgtttgtgtaggcgctttttgtgctcggcgaaaatagcgcgttttttatcgaactggctggcaaattcgagggcggtatttaacaaggcatcactgtttgggcaggcttgttcgataacatgatcagcggcaagttcgtctgcagtaacacggcggcccgttagcatcatctcgttaaaacgatagtctggaatggcttttttaatgaaggcgagcatgcccggtaaaaacgggattgataagtcaacttctgggaagcagaagaaaccacggtcgctttgcataaacctaaaatcgcaagcgcacgataaaatggcgccattaccaaacgcgtggccattaattgctgcaattactggcattgggaagagtaataggcgtttaaataccgcatccattgagtgcataaagccacttacttctgtaaatttttgtgtttttaatgccggcattagccaatcggtatctatgcccaaactccatgatttttcgctgcttgaagtgatcaccagtgctttgtgttcagggttactttcgatttcgtcaaggcaagttaaaaaagcctctgcaaaagcaggattatggcgattttcagctgttgtcatagttaagatagcaacagatccttgtgtacttacattcatcagtgtcatgctgtgccttcaattttattgtgttgtgggcatagttatataccatcggtttaacaaaataaacaacaagtctgaccagttgtgaatttaggggcacttctcttttggttgatatggtcttttagtcgaaactattttccaatttgtcgctaatagtggtgagtcatggtagcgttagatcaaacacactatttaaagcataacaatggatttgatcagttggcagtttttgggtggagatttattaagtccgatcagcacaataatgctcattgtggttgcgagctttacttcaatgatttcagcggcttttggtgcgggtggcggattgatgttgctggtgatcatggcatctatgcttcctatgagcgtggttattcctgttcatggcttagtgcagttaggctctaatgcaaaccgctttatgttcacgtttaaacatattgatggtgctatgtttgtgtacttctctttagggggagtcataggtgcgctggttgcctcaacgattgtcacatcaattccgcttgaattaatgaaaatagtcgttgctgcatttgtgctttatttactgtggggagttacgccaaagcttagagaaacctcaaagttatggcgcgttctcgctgggctttggaccacgtttatctcgatgtttgtgggggctagtgggcctttggttggcagctgcttatatgtaaataattataataagcttaaatttaccgccactttttcaagctgcatgacagtgcaacataccttaaaagcgattttatatggggctgtcgggtttgcattttggcagtggttgccgctggttatgctcatgatagtgagtggtgctttaggcacttggcttggccttaagttattgcaccgcatttcgtcagataaatttaaaaagatttttcgtttagtgttaacactgctttccctgcaacttgcgtggcagggaattatggcttttaatatttaaataaacccagtttagcaacgatgccgcgctctaattcgttgagttggcctatggtgttatcaaggtgttgagcttcttgcgataggctcttagcgccttggttaatgagctgcatggtatttaagatatcagcggtaacactggtttgctcttcagaacttgctgcaacgctctcgttcatttgattaatggtattgatttgtttagcaatatctttaaacactgcttggcttttttgatttgcttggctcactttatcgcttaatgatttactttgctccgtagcggttacgcaatcagaggtattattgtgtagcgatacaataatcgactcaatctcagacgttgaatcataggttttactagcaagcgctcttacttcatcggcaaccacagcaaagccacggcctgattcaccggcacgagccgcttcaatagcagcatttagagccagtaaattggtttgctcggcaatactttttataacatcgagcacttggctaatttcattactgctggcgtttagttgtttaactacgtttgatgtatggtcaagttgtgcagctaattcgtcaaccatgttgccattggcattcatattttgttcgccttgttggcataagcgatgaacgtcggtggtttgctgcgcggtttgattagctccttgggcaatctctttggttgcttcacttaactgactaagcgcattggttgctgaatcagtgcggttatattcaagctcggcttcgtttttagagcgcactgaggcttcgtttacagtgctggcaatcatttcaagctcgctggctgtgctgcctagctcagtaattatttcttgcacttgcgctataaagcgattgaaaccatcaactaaatagccaatttcatcattcgattggtagctaatgcgttttgttaggtcgccttcacctttgacaatttcatcaacaaggctatttacgctatcgattggttttatcactaaaagccgcacgatataaataatcaccgcacccaaggcgataaaagagactagcaaggtaataaacatggtgcgtgtcgactcagcaatggtgctatgcagtgcttgttgtgagtaaccaatttttatgtgaccaattaaattatctaaatagtgcaaatcaatagttttgctaaccgatgcactattgctttgtttagcgatagcggcaagtggcttattacgatgatctgtcactgaaatactatgtacatgtttgttttgcgtaaaggctttaataatctgattgattaacggctcatcataagagaataccggttcagctaaaataacctgcatttgctcattaagggcagtgatgtcaccttgccattgctgcgtctgattcgactttgccagcaggtagtttgcgctgatcacgaagatcacgcttagtaaaaggcacaaagacagtgccaaagtcattttgtattttaatgatttcattgtgcgctcattgaaatgggttaaaccacaaagggctatttttattaggtgtgttcgacgataacgttgggttatctagctcaataacgcgacgcgagcttaaattggcttttgataaaaccgtttgtacttggctgtctgccaaaaacatggcgttaaatgtgccatcggcaatcatctcgtttagggcatcatttagctgtttatgtagtgtgtgattgtttttgttgacgaaaaagtaaagtggtgcggtgtacttaataactaagtatggctcaacagtgaggttaagctctgagtgattggcaatttcatcccaaggttcattcaccccacgtgggaagtagtcaaatcgctcgccttcaagcattggaaataagttagggtattttaatgtggtaacaacgggcagttgattcgcttttaatattttcgtgtctggccaagttttaccttgcccagcggtgaagcgttttaaatcttgtaaactagttaccgagctaaacagctcgcgattttgtgctttcacaatcgcgactcgcatgccaagtaagccacgaaacaagggaatataaacagcttgataatcttgctctaattgagtagatgtcatgctccacatcacatccagttggttgttttttacatcgtttaagatacgtgcattagagatatctttattggtttcgtaaggatgaacatactctaagccagcacgttcaatggcgctgatcaataatttgtggggaagggaggtatcgccactgtagctttgtacttttaccggtgcggcgaaacaagccgacgtaaaagcaaagcaaaaaagaaaagcaaaatgacgcataaagcacctttgttattattatgtaaacaataaactaaagtgctttacgcgctttctcaatcttatttcttatgcatacgtattcaatcgctcagaaggctgtcgattgatttatcaccattaaacaattcaaacactcttggctttttcggtgtatgttcagcaaggtatagcagggtatcggccacatcttcacggttgatcaccgcatcttggcgggttgcagggcgtgtggtggttaataatcccgttgctgcatcatttaacagagtgccaggtctgactatgctgtaatttaattcgctattgatcaaatgttggtcagccatgtgcttagcaactaaatacggttttatactgctttcaatgttgtctggggcatcagcaccaattgagctgaccataataaagtgcttaaccttggcatctgccgcataattaatcgctttaacagcggcccataaatcaattaataaggttttatctgcacctgttgaaccaccagaaccagcactaaaaattacttgttcaacgccttcaaaggcacgactaaaatcattttcgagatcttgctctacaatcgttaaattattactttcaagcgtactcagtttgcttttgtctcgaactaaagcaactacgtcatgaccgcttgccagcattttttcggtggtcattttacctatttgacctgttgcgccaatgattaaggtcttcatatcaaactccttctaattactgtgtaagtaaagaccttggggtgaggaattatttttaaaggggaaactaaaaacgaaattgtaatcaagaataataatggggctaattaaagccccatccaaccgctaaattttattgcgaattaaatcgcgtataataaagcgagcagggtgaatggcttggctcacacgttcactaaatggtcttggttcattgtttaaacaagcaattaaatgctcagcacacaaaggggcactacacaggcctcttgcgccaaagccagtaagcacatgcaagccctgctgaggtttcgttaaagcttggtattgataacgcttacccaagcgtagattggcaaacgcatttacataatcactttgttcagcccactcaccagccataggaaggtggtcgatgaaggtacatctaaccgctgctttcgctgccgttatttcacctaagctattggcaaactcgcagttgggataaaagtttagtaattgctcgcgattagtgtggttgtcttgctctttaacttcacggctttttgagtttttttcaaaggtcgcgcccatacaatgatgaccctgatattcaggagtaaaatagcctttatggcaaagcacggttttcaggcgttttgactgctcgcttgcttgtacatgagagacttggccgcgcacaccgacaacggggagtgtgtgagtttggctaaactgatcactgtgttcaccagcacagttaattacatcgctaaaaggcccaaatgtttgctctttgctgtgtaaaagccagccgtcagcggttttttcgagtttttcaatatggcaattaaagtggctatctattttactattgttactcgcacttaaggagtttgctgctttaaataatgctgtaacaagtgctggtggatttacccaaccgccttttgcaaagaacacacctgagtaaccagtatctacaccggcaattttatcaccttcttcggcacttacattgcgcattaattcagttggccaaagttctttatcggcaaggttttgatgtttatcagctaggccttgtttaaccgcatgttgcaatacaccacaccactggtgagggtagtcaaaaccatcatcaagcaattgctgataaagacgcatcgcatataaaaaagtatgggcaaacatttcactgtgcggtgaattcttcgcttgtaaatgcggataaacagctccttgtacattgtgtgaagcgcccatggcaagggctttatcttggcaaaaaagtgtggcattcaggcctcttttagccagtgaatacagtacgcagctactggcaataccgccgccgataacagctacattactcagttcactttgttggtgagcaaaatacgcaggtcctgattgttgctgattaggctcggttagcttaccaatcagcatttcgcgctttttaccgtagccttttgctttactcatgctaaagcctgcttcgattagccctcttcttacaaagccagcggcagtgaaagtggcgagtgtggcgtttgctcttgaaatagttcgcattttgttaaacaaactttgctgccacatatcagggtttttgcttggagcaaagccatctaaataccaggcatcgataaccccttcacttgggtagctcatggtatcgatgctgtcttgtacgtcaccaaaataaaggtcgagtattagcttgccgccagcaaattcaagacgatgacaaccggccaaattaatagggtattgagcaatcagttgttcactataatcgcttaaattaggccaggctttaagtgcttgtgcgaggtcatcacgcttaatagggtatttctcgaatgagataaagtgcagtctatttacgcatttattgccactaaggtcgtgttgcttttgaacttctagctctgcatgctgcctatcaaggtgagcagcaaaatgttgccaggtatttaaaaagttaagcccagtaccaaagcctgtttcagcaatggcaaagtggttacggtcatgattttgtaatcgttgcgggatattgttttgttggtaaaaaacataatgtgattcggctaagccatcgtcgttagagaaataaacatcgtcaaactgatcggcgacaggggtaccaaggtgattaaaatgaatatgtgcgtttttgatcatggtttaactaattaactacaaactttttttaattattttacgtgttttctttgaaatagtctggcgttatttataagctagacattcagagtacaagtgtacgctagaaagctgaccacttcgaaagtaatttcagcgtaaaatagaacacaatttagtatagagctaaggtaattacccatgagaagagccgttattacgggcatcggtgttgtttcaagcatcggtaacaacaaagaagaagtattagaatcattaaaacaaggccgcagtggtattgcattcaaccaagaatttgccgactacaacctacgtagtaacgtttcgggcaaaatcgatattgatgttaaagagtttgttgatcgtaaagcaatgcgttttatgggcgatgcagctgcatacgcttatatctcaatggcacaagcaattgaagatgcaggccttagtgaagagcaagtttcaaacgagcgcactggtttattagtgggttcaggtggtggttcatctaagtggcaagttgaggcagctgacattttacgtgaaaaaggcgtaaaacgtgttggtccttacatggtaccacgtactatggcgagcacgacttctgcatgtcttgcaacacctttcaaaattaaaggtgttaactactcaatcagttctgcgtgtgcgacatcggcacactgtattggtcatgcggttgagcaaattcaactaggtaagcaagacgttatttttgcaggtggtggtgaagagcttcactggacacttgcaatggaattcgatgcaatgggtgcattgtctactaagtataatgaaacaccagagaaagcatcacgtacatacgatgcaaaccgtgacggttttgttatctctggcggtggcggtatcgttgttgttgaagaattagagcatgcacttgctcgtggtgcgcacatctatgcagaaatcacaggctacggtgcaacttctgacggttacgacatggtagctccatcaggtgagggtgctgtacgttgtatgaaacaagcaatgcaaggccttgaaggtggtattgattacttaaatactcacggtacttcaacaccagttggcgatgttaaagagcttggtgctatccaagaagtatttggtggtaactctccaatgatcagtgcaactaaggcgatgacaggtcatgctttaggtgcagcaggcgtacacgaagcaattttctcgctattaatgcttgagcataactttgttgctccatcaatcaacattgatgaactggatgagcaagcacaaggtctaaatatcgtaactgagcgtaaagacgttgaactaaatacagttatgtctaacagctttggttttggtggcacgaacgccactctcgtaatgagcaaatataaaggttaaacctctccagtatttgcttaaagccgagcaattgctcggctttttcattatcgcattttattccaactgaaactcgcaccttgaggtggtttgggtataaataaccccaaaatcgtcttagttgttacctatccgaataccgataaattcgctacaatagcgccactttctgcctctcggacacacaaatgaaaattcttgcagatcaaaatatgccattggttgagcagtactttgccgattttggtgatgttgagcgatttgatggccgtaatctacaaccagagcagctagttggagtcgacattttgttaacccgctcggtgaccaatgtagataaagccctgctaactcaagcagataaattaaaatttgtgggcacagcaaccataggtgttgatcacattgataccgaattacttgctgagcgaaatatcgcatttagcagcgcccctggttgtaatgccgtggcggtagctgaatatgttattagtagcttatatgccttgagccaagaaaatgccagctcattacaaggtaaaaccatagggatagttggtgttggcagtataggaagctgcttacgtgataagttaagcctgctcggtatgaatgtgttgctatgtgacccaccaaagcatgaagctggtgaacttgcagaacacattgagttagacacattactagctcaagctgatattgtgacttttcacgtgccattagttaagcaggggccacataaaaccttgcacatgcttaatgaaacacgcttaaaggcacttaagcctggaatgacaattatcaacgcaagtcgtggtgatgtaattgataaccaagcattgctagcattgtttgaacaaggtgcccaattagattgcgtgcttgatgtttgggaaaatgaacccaatatactgactcctttgcttgattatgtgcgttatgccagtgtgcatattgcagggcatacactcgaaggcaaagctcgcggcacacaaatgctgtatcagcaagtgtgtgagcttgaaggcatcgtagcgcttaagtctctggacgattttttaccggagccaatcagccattgtgtcacactaggtgaaacctttaacctagacgatataggtcgcttagtgcatctaatttatgatgtgcgtcgtgacgatggcattttacgaagtaaattagcaagcgaaggctttgatagtttacgcaagaattacccgccacgacgagagtttagtactttatcggtggctgccaacagtgcatgtgaaggcgcattagctgcactgggatttagaattaacgaataaagccatttgctttattcaacagaggaaaacacatgtcgcaaaaatttaatgtagccgtattaggtgccactggtttagtgggtcgtcaaattatcgaaaccctagaagatcgtaagtttccagttgaccaattatttttactcgcaagcagccgcagtgctggtgaagaaattcaatttcgcggtgaaagcattgaagtaatcgatgttgaagaatttgattttagccaagctcacattggtttattttcagcaggcggtagtgtctctgaaaaatacgcaccgattgcggcagatgctggctgtgtggtaatcgataatacctcacactttcgtaatgacttcgatgtgccattaatcattcctgaagtgaatgcatcgagtttagctgatttcagaaaccgcaatattattgcaaatcctaactgctcaactattcaaatgctggtggcgttaaagccaatttatgatgcttatggtattgaccgcattaatgtttcaacttatcaagcagtgtcaggtgcaggcaaagaagcggttgatgaacttgctaagcaaacagcaaacttaatgaatgcgcgcccgatggataatgctgttttccctaaacaaatcgcttttaacgtgatcccgcaaatcgacagctttgaagataacggttatacacgtgaagaaatgaaaatggtgaacgaaacacaaaaaatcctaggtgataacagcgtagtggttaaccctacctgtgttcgtgtacctgtgttctttggtcacagtgaagcgattaatattgaaacgcgtatgccggtagatatcgaacatgtgaagcagctattaaacgatgcaccaggtgttgagtttattgaagacttagcggattacccaacagcagtgtctgacgctagcggcaacgatactgtgtatgtagggcgtttacgtgccgatatttcgcatccacatggtttaaatatgtgggttgttagtgataacacacgtaaaggtgcggcaacaaatagtgtgcagattgctgaagagctaatcgcaaattatttgtaaatctgatgattttggctgagctataagtgaaagagagcggcaatttgccgctttttttgtgaattcactgccaaattattgccgcatacgctgtaaaagcgtataaacttaacaataacaataaataaaactctcagccgtagatatttaagctatttactttcaaagtgttgcgatggatattgcctagcatctggtttatagtctgcagctggaatagagcttgcaagaaagcataattaagaatcaattctgcaagaattacttgatgtttaagcaaccaaggttgctgcgttaacatttaaaacataaaggatcagcatgcgcggtttagcaacactcttcatattagcgtctgcattggtggttacaccgacatactctgatgaaggctccacacttaaaggccctaaaggggtcgactatggtgagcaagggcgatcaattggcccaataaagccaactgatacgttatggcgtattgccgcaaaaattcgtcctgataactcagtttctatttatcaagtcatgcaagcattgtatgacaaaaatccgtcgtcttttttagaccaaaaccttaatcatatgcgcgatggcgcataccttaaaatcccaacaattgcagagatgcgtgcggtcaatcccacgttagcaaaagcgcgctcagagcaagatgatgaattatgggaaaaaaagaaaaatggcacgttaacgactgctgaaataaatgaatcacaaaagaatgtaacgcaggctcgtaaagtcgacgtagacgaagcaaaacaagagcttaaacaagaaataaatacgatcaaagcagagcaaggcactcagcttgttgagttgcaaaagcaatttaaatcgtcggtcgagaatgtagaagaaattttagaagagaataacaaactaaaaaaacagttaacgggtatatctaaggagcttgagactgttcgtgatcaacttggtcaagacagtgaaatccaaaagcagcttaaagagctgatagccaaacaaaacgaaattatagagcagcaaagagcaaaaaagattgaagaggacagtgggtttaatttttcgtctattctgagtaacccatttgttctcggtgctttaatgtttctaccggctttgctgataattgcagccgttgtgatgttcttgaaaaaacgcaatagcagcgaaaccgatgatattgatgacgatgagtttttaccgcaaagccctgtccatacgccagatgatgatcttgatccaattgtagaaactgatccacttgtccctgagccttcagacgatgatgacgaactaagtgtccgattagatgacgatcaagatatgctgccagacgatgatattattttcgacgacagtattgatgatagtttcgatgacgacgatagcgtattaaatcaagatgaactaaacggtttgcttagcgatgatattgagtttgctgatgagtcgacagcgggcgttgacgacgatgatttggatgcatttttacagcaagattttgaccaaacagacgatagtttaggtgatgaaatagatctggatagtgaacagtcagatactgacttatctggcgatattttaagtgctgacgatattgatgacttgttcgacaatgatgcagatgattcacttgatgatacaaatgaagatatggcggctctaagtgaagagcttgctgaagatgattttgatattgatagtttaattgatgagcaaaatgcgagtgcagatgataatcaagacgttgatttagatgatattgatgacttactcgatgctgccgatgagcaaccaacagcaggcaatgttgaagcagaactcattgatgaagacgatttcgatattgatagtctaattgatgatacacaagcagaagacgactctgatgatattgattcgttaatagaagaaactaaaaacgaacagcctgcacagcaaagtgatattgatgacttaattgacgaagatgagttagacgaagacgaccttgatgcgtcaatagatgatactgcggaggaagttgaggctaatgatttagccgatgagcaagacgatgatgatacgtttgatctcgatgatattgattctttaatcgacgatgtagccgagcaagaggcaccagcagaagagtcagcagttgatgagctagtcgatgagcaagacggtgacgatacccttgatatcgatgacattgactctttaatcgatgatgtagccgagcaagacgcaccagcagatgagcctgtggttgatgagctagtcgatgagcaagacgatgacgatagccttgatagcgatgatattgactctttaatcgatgatgtagccgagcaagacgcaccagcagatgagcctgtggttgatgagctagtcgatgagcaagacgattcagatactcttgatagcgatgatattgactctttaatcgacgatgtagccgagcaagaggcaccagcagatgagcctgtggttgatgagctagtcgatgagcaagacgattcagatactcttgatagcgatgatattgactctttaatcgacgatgtagccgagcaagaggcaccagctgaagagcctgcggtggacgagctagtcgacgagcaagacgatgacgatagccttgatagcgatgatcttgactctttaatcgacgatgcagccgagcaagaggcaccagctgaagagcctgcggttgatgagctagtcgacgagcaagatgatgacgatagccttgatagcgatgacattgactctttaatcgacgatgtagccgagcaagatgcagcagctgaagagcctgtggtggatgagctagtcgatgagcaagacgatgaggatagccttgttagcgatgacattgactctttaattgacgatgtagccgagcaagatgcagcagctgaagagcctgcggttgatgagctagtcgacgagcaagacgatgaagatagccttgatagcgatgatattgaatctttaatcgacgatgtagacgagcaagatgcagcagctgaagagcctgcggttgatgagctagtcgacgagcaagacgatgaagatagccttgatagcgatgacattgactctttaatcgacgaaggtgatcttgaagaaagtgattcagaagatgcacttgaagaagacgatatagattctttacttgatgaagttgaacaagcacagccaagcagttctgaggacgagttagctgactctttagatatgggcgacttagactcactactggaagaagaagatgatgatgaagctgtttcagatgatgagcttgaacagttaattcaagaggctaatgaacttaaagaagatacacaagctcagatagatgacttaattcatgatgatgcccaaagccaagaacacgatgagagtttacaagagtcactagaagatctagctgatgcagaccaagcaatagacgacttgaatgttgagtcagtggcttctgatttagtcgatattgatgaagcgcttaatcacgagtttaacgaagacaccgatgatctactagatgacgaagattcactggatgaatttgatgatccatcactaaaaagtgttgatgaattattaagtgaaataggtgaagacgaagatgattatatagcagctccggattggtctattgatgatgaacctcaagaagatattgaagaggttgaaatagatttaggtgacgatcctcttgccgatgatcaactaacagatgaatttgacctaggcgttgaagatgagcctctcgttcaagacacagttacaccgagtcaagaacttgatgaataccctgaacttgagttagatgatgctggttttgagtcagaagactcaattgatgagttccaagacgatttatctttacagccaagtcaggcagagcaagatcttgcaaattcactggcgggtggtaatgaacttaatcagttagaggatgactttgacgatgagttgttgctagataatgagtttactgagcaagatgctctagtatctgaagatgacttaacagagtcaaatgatgctgtggctacaagtgctgagtctgagctgccgacagctgcagataatagcgataaccttgagagcgaagcggagtttgagctagaccttgacgatattgagcttgaacatgaagacgaagctgacaccatcgcagacattgaatcagaaattgtgggcagtgatgacttaactacgttatctgatgatgaaatcgacgatgatttcatggctgatttaactcaaacagactttgatgcgctgctaaatgagctagcagagccagatgaagccgacattgcagatgccagtgagtttgatgttgattttaacgcactgttaaatgaagacttgcaggttgaaaacgacgcacagcctgagcctgaggataatgtatcagcagctcaagagcctgagtctacaggcgatgagtttgttgatattgactcgttacttgagcaaagcgacgatgaagcattagaccatgaaccttacgatgaggttgacatggatgtagggcttagtgattttaatgaattactcgcaggtgacaatccaacagatgttgatgccgaaagtggcggatactcagcaaaactagaccttgcaagggcatatattgaaatcgacgactttgatgctgcattacaagccattgaagatgtgatcgaaaatggtccagaagaagtgcaagaagaagcactttcgttaaaggctaagattaaagagtaatactatccaataataaaccgagccaaagagctcggtttttttatgtctgctgcacagcattctgtactcaagccatgtaataatctgtaatacacaagtgaatttctccatcttactatttaactgaaccatgagggtttagctaaaaatttactaggagaaggaaaatgagttcactttatgtatcaatcgatggaagaccagtatccgatgtatttactcaattagccgatacagcgtttgaaatactaaaaaatgaagggaatgcctcaacgcagatagtgcctgaaattgtgaataacaccaacaaaacatggcgttataaaacaagtggtactatgcaagggacaatgcaataccctcaaagtggaggcattgagccacattttgctcgtgcatggactcagcgttcaatggggacagacggctcatttggttgggttatttatactgatgatgataataatcaattatttgtagggtattgcgtatattatatcggtgctcaagctaagtatcttgttaagtacgagaatactaactttgcaggtaaagacaataacgccctattagctatgatagattcagaaggcaaaacggggggttatgcatttgaatttagcggtgtaaaagtagattactctggattcgagcatcggcaggaaggggttgcccaatcaagagagctgcgggtaacgttagaataattaagttggtttaatcaattagcaagttggcatattgtacataaaaaaccgagcaatgaagctcggttttgtatctaagcgaaggttattgcttgtcttgcaaacgacgcgctttgaaatcagactcagctttccattttggccagtcaccgttattagcaagtttggctgcaatatcaacgatcagttcgatatcttgcttaacaccacccatagaccattggggtgaatagtcgtcagcttctttgtgatatttatgggctatataatcaggatcagtatcacctaagctcataaataataaacttggcacgccttgtttagccagtgagaagtgatcagagcggaagaacaatccattttgaggacgagggtccatttttacatgacgcccttgagctttagctgcatctgcaaggtagtcttccatttcagacatgcctttgccgtactgcaatatgtagtcaacgccatctagcacgttcataccgtcaatattaagcaacgcgaccatttgtttggttgttacaatttcgccagtagcaaattgctcagaaccaataagcccagtttcttcagccgtaaagttggcaaagataatagagcgtttaaatggctttttcttatgcatttcagtaaggatacgggctgtttcaactgttgctgcggtaccagaagcattatcaacagcaccattgtagattttcacaccatcatcagtttgcttcgtaccaaagtgatcccagtgcgcaccaattactatgtactcatctggagtttcgctgccttttagtgttgccacaacgttatgtgattgtgcttgagagatatcactttttagagtcagcgctgcttttgcttttaagtcgacaggtttgaaatcggcttttagtgcatttgctttctctgtttgataatcaagccccgcttgagcaaagatctcatttgcagcttgctcatcaatccaacccattacagggatgtcagaagcatttttatcttggtcaattaaagtgtatttactacccgtgttcgagctttctactacactccaaggataagcagcaggggctgtttcgtgaacgataaataccgcttttgcgccttggcgtgcaccttcttcatatttgtaagtccaacgaccatagtaggtcatggcatttccagtgaaaagtgattcgtcttgggtggcaaaacctggatcattaacaagcacgataattgttttgtcttttacatcaatatcggcaaagtcattccagttgtattcaggtgcattaatgccatagccaacaaacacaacatcagagccatcaatgttgatctcagggttaatctgttgagtacgagcggtaaaatcactgccagcattaaagcttaaatcacccacttgtaaggtcatgttttgatctggggtgagttttgccatagtaactggctgtaaaaactcgccattaaaactaccgcttaagccgagttttttatattcatcggctaaatagttaatagtgagcgtttcgccttcagttaaaggaccgcggcctaagaattcatctgaagcgagggttttaatatgtgagcgtacattctcaatattaacggcttcaaggtttttttcgcttggctcatcagcgcttgatgttgattgctcggagcaaccgaataaaccaatggcaagcgctaaacttgcgtattttaagtgagttgtcatagtttttctggttgattgcaaagagttccactatatgggacgagaagggggctgtctagaaagagtctataagtaactaattattcaggatgaaaggataataatgcacctttcatcctgtcaattttaccaccacgctttatcaactgcgttatcttgaattttaaatacctcaccaacaagtggggtacttagcgatacgtgctcctgttgtgcttttttggtgacacgcttgagggggtcataccaagcatgaaatgctaaatcgaaagtaccattatgcactggcaccatgatatcaccttgtaaatcgagatgagcttgtacagattgctctggtgtcatgtgaatatcagcccaatctttgtcataagcaccggtttctataaaagtaatatcaaacggcccataacgattaccaatttctttaaagccagcaaaatatcccgagtcaccgctaaaataaaagcgcttgtcatttactttaatagcccatgaaccccaaagggttttattgccgtctgttaaacctcgaccagagaagtgctgggttggtgtaaatacaatttggctatttgccatattttgctcttgccaccaatcaaaactatggactttttgtctatcaacgccccattttttaaggtcgttttcgactcctaatggcacataaaaagaggctgttttatcaacaagctgtttaattgccgctttatctaagtgatcataatggttgtgtgagataaacactttcgcgatgcttggtaattctgcaatactaattggtgttggttgaaagcgctttggacccatgaatgaaaaaggcgaagcgcgctctgaaaataccggatcaaatagccagtattcgccatacactttcgctaaaatagaggagtgacctagctttacaaaatgcactgtgtcatttgataaacgctcaagctgagcatgagaaacacagtgcataggcagctcgccctttggctctgcatcaattttcttttcagtaatgaagcgtttgaagatagctaacgttttcttaaagctgggtctttctacttcagcactattgtggaacttgccatcagccagttgcgcagagtggctgttatcactcacgccttcagcagctaattgattattcataacaaacactcctatcacgatgcatagagtggcgattgcgagccattttagaaatttcatatcgtcaccataagtaaactacacggtgtagtttttcatggtttgctataaaagtaaactatctagtgcattttttatttttgcgttacactagtaacccttatcggaggggtccatgaaattatcacagagaaaacgattagatattttgaatgcagctgagacattgttttttcagcaaggtgttgagcatacaagtatggatcaggttgcaagcttagcgggtgcctcaaagcgtaccgtatacaatcactttgaaaataaagatgtgttgtttcaagccattctagtgtttatgtttgaaaaagttcgccaagagcaagcggttgtatttgatgctactttaccaattgcagagcagttaacacgtattgccgagcaagaagtggcacttttgacctctgaagaatttttaaaagtagcgaaagtcgcctttatgcaaatgttacagcagcccgatttagcaaaatcattagcgagtaacaacatgggctgtatgcacgacctagtgacgtttttagaagcaggtgtgcaagcacaggttttagctattgatgatgttgagtttgcagcaaaacaatttgtgtatcagttaaagtcactgatcttttatccgttgctgtatggctttgagcgccaagaaggcgactcagataacaaagtaataagcgaaaccgtgaaaatgttcttagcgcgttatgggcgctgatattttggaatataaaaaagcccgcttaatgcgggcttttaaatagttgtaaaactattattttacttctttaccagctgcttgttggtcagcatggtagcttgagcgaacaaatgggccacaggctgcatgtgtaaagccaatttcgtctgcatagtcttttaatgcatcaaactcagctggcggcacgtagcgtttaactggtaagtggtgctttgaaggttgtaagtattggcctactgttagcatatcaacgttatgctcccgtaagtcacgtaacacttcttcgatttcgctaatttcttcacctagacctaccatcaagccagacttcgttttcacattcggatgtgcttctttaaagcgacgtaatagctcaagtgaccacttatagtcagcacctggacgcgctaatttgtataaacgcggtgctgtttctaggttgtggttaaacacatctggcggtgtctcgattaagatatcaagggctctatccatgcgaccacggaagtcaggtactagaatttcaatcgtgatctctgggttgtgcttacgaatttcacgaatacagtcagcgaagtgttgtgcaccaccatcacgtagatcatcacggtctacagaggtgattacaacatagcttagcttcatgtctttaatagtaagcgctagcttttcaggctctgctgcatcaggctttaatggacgaccatgagcaacatcacagaacggacaacgacgagtacaaatagcacctaaaatcatgaaggttgctgtaccgtgattgaaacattcagataggttagggcacgaagcctcttcacaaactgaatgcaaaccatgtttacgcatcgcttgtttaataccatcaatacgttcagttgatttaggtaagcgaatttttagccactctggcttacgcaacatttcgtttttttcagtcggtaaaactttaactgggatcagtgccattttttctgcatcacgcagttttacgcctggttccattttgactggtttattcattcgtttcaaacccttcagtgtgcttaaccacagtagcattaagctttttaatcatgtgttttacaagccctgcacctgcttgctcgaggttttgcggaccattaaggtcagttgtttgcaccatgttcatgcctgcatagccgcatgggttgatacgtaaaaacggactcaagtccatatttacattcagtgctaaaccatggaatgagcagccgcgacgaactcgtaagcccaatgaggcaactttactatcgttaacatagacacccggtgcatccgctttggcgtaagcatcaatgtcgtagtcttttaacgtgtcgataatgcactcttcaagccaagttaccagctctcttacaccaatgtttaaacgacgtaagttgaacagtacatacatcatttgctgacctggcccgtggtaggttacttgaccaccacggtctacttggatcacttcgatatcaccggtatttaataagtgctcagctttaccagcttgaccttgagtaaatacaggctcgtgctctacaagccaaatttcatcggctgtgtgctcatcacgggtgtcagtaaaagattgcattttttgccaaattggcatgtaacgctgacgacctaattgacgaacgattaattctctttcgctcacgacttactccgtaatcagcctatagcatgtgacgtacgtcatcgatgttgctgatcacgttatagatttcttcaatgtgctctttacttgtaacggttgccacaagcgtgactgactcgtaattacctttgctgcttggttttacctttggcgcataatcgcctggtgcaattggttgcagcttttctaggatctggtctgttagatttacgtttgctaagcccatgattttaaaagtaaatgggcaagggaaatctaaatactcatcaaacttagtatcttttacaggttgaaccacgacggtgactcctcaaaacagtgagtgtgcttaatcgagactttctcggccagttcttggcagtaagcagacttaaattacgacgcactcgacccagcgcgactgatatggggcgcattctatcatttttcagacaaaaaaaaacgccttgcagtgcaaggcgtttataaacttttatctgagattacatgatctgtaaacgtaagtaatcgtagatcttgctgaagaagctgccttcttctacttcttcaagtgtaactaacggatattgagcgatttcttcaccatccagttgcaagaataaggtgccaactttactacctttagcaagtggagcttctagagttttatcaagctcaaagttcgcttttaagtttttacgctgaccacgtgggatggtgattggcgtatcttctaaaatacccagtgaaacattttctttgttacccatccaaatgcgttgctccgcaaagctgtcacccgcttgatatggtgtaatcgtttcaaagaaacggaaaccgtagtttagtaattttttactttcaactttacgagcacgctcgctttcggcgcccattacaacagcgattaaacgcatatcgtctttagttgctgagctcactagactataacccgcctctgacgtgtgaccggttttaataccgtctacgttcatgctttcatcccataatagagagttgcggttatattgtttaataccgttaaaagtgaatgattttttagcgtatacttcgtattcatctggtacatcgcgaataagtgcagcaccaagagtggccatatcacgtggcgttgtgaagtgctcgttagtatctaatccgtgactgtttacgaaatggctgtttgtcatgcctaacttttcagcgtgagcattcattaaatcagcaaatgcactttcgctaccagcaatgtgttcagccattgctacgcacgcatcattgcctgattgaataatgataccgtggttaaggtcgtcaacactgatttgcttacccacttcgatgaacatttttgatgattcaggaaagttttttgcccacgctttttcactcacggtgaccatgtctgttggtgagatattgccggctttaatttcagtaccgatgacgtaactggtcatcatcttggttagactggcaggtgccagcttagtatcggcttcgccttcagcaatgaccttacctgtggtgaaatcaaccaagaaataacctttcgcattaacttgtggtggggcagggatgatttgggctgttgctgaaaatacactcgctgtgcaaacaaggccacaaacgccacttaagattttatattttatagatttcatcgtactcattaatggttaaagttaaacatgtcgcgttaacctattctaaaggtcttactcactgtaaagcaagaacgcgttctgaaattggttttgttttagcttttctaaaacagtttgtgcttctgcggcatcttttattggaccaagacgtaatcgatagattccatctttttcaacaatgtttgttggcacatgatattgctgacgaagttgaaacgcgagcgcttcaacattggcaagagtacttcccgctgcaacctgtatgtaacttaaacgaggggcagaattgctaagggtaatggcttcaaccttaacacgcgctgtaccttggcgataataatctagtttataggccgcagaataagataaatcgatgatacggtcatcatggaatgggccgcggtcattaacgcgaacaatgacagatttaccgttatctaaattagtgactcgtgcaaagctgggtaatggcaaggttttatgcgctgcagtcatcgcgaacatgtcatatatttcaccattagatgtatgatagttatgaaattttctaccgtaccatgaggcaatcccttcttcagagtagcctgtttcatctaacatgggagtgtagcgttttccacgaacttcataagggcgactcgcactggcactcttaactacagccgttactactgcatcttgcatttcaagttcggtaggctttcgaagcggggctgcatcatgctccatagcataacgaccttgctgcgacgagctacaagcagtgagcattacagaaaataatgcaacaaatagaaaactaacgcgatgtgtcattattttaaaagcatccttttatctgtggcgatagacataataatgccaaatcctgccatcaaggtcaccatagaggtgccgccataactgatcaagggtaaagggacaccgaccacaggcagtaaacctgacaccatgccaatatttacaaatacataaacgaaaaaagttaaagttaatgcacctgcaagcagtttaccaaacgcatcttgggcattgaccgctatgtataaaccacgaccaatgatgaataaatacatgcacagtaatatacacactccaaataagccaaactcttcgcttaaaacagagaagataaaatcggtatgacgctcgggtaaaaattcaagttgtgattgcgtaccttgcagccagccttttccttcaattccgcctgagccaattgcaattttcgattgaataatgtgataaccagagccaagaggatcactttcagggtctaaaaatgttaatacgcgttgtttttgatagtcgagcataacgtagtgccaaaatggccaagcagcaatggctactgtagcggtaaaaaagccgattaatcgccaacttagacctgacaaaaacaatacaaaaatacctgaactggcgatcaatattgatgttcctaagtcaggctgctctttgattaggatggtaggcaccatcacaatcgcaaaaccaatgattagatgaataatgcggggtggtaaatggttgcgaccgatataccatgcgaccatcataggtacggcaattttcattaattcagatggctgaaatcgagtaataccaagatctagccaacgttgcgcacctttcgagctaacaccaaatagcagtaccccgatgagcattaataggcccacgcaataaagtggaataaccattctttttagcgtgtttggcgaaaattgcgcaagaataaacatgcctagtatcgccccaaacatccgtgtggcatggcggatcatcatcgctgggtcttgaccactggcactgtaaacaatggttaggctgcctaccatcatgagcattaacgctatcaggagcggtaaatcaaggtgaaggcgttgccagatagagcgttttttatttaatgggatcatggcgcatcactttgtgcaacaggcagagggttagctgaaaaataatagtccatcaattgacgagcaataggcgcacctacggtactgccgccaccggtattttctacaaccacagaaaccacaatttgtgggtcattataaggtgcaaagccaacataaattgcgttatcgcgttgacgctctttaagtgatttagcgtcataacgttcaccttgggcaatactaactacttgcgcggtaccggttttaccagcagggtcataattggcacctttaaatgctttatgggcggtaccggtgactttgtgtactgtgttgtgcattgcatcaagcgctatttgccaatggtgagggttttttagcaccaccggtggcttttcatcgttgtttatttgagtgacttcattttcttttttagccacttgcactaagtggggtgggtgatcaatcccacgattaactaaaatattcgtcgcattggctatttgcatcggtgttgcggtccaataaccttggccaatacccactgaaattgtatcaccacgccaccacgattctctaaagcggccttctttccattcttttgatggcataatcgcagaggtttcttcatgaatatcaatacctgaaagttcgccaaaaccaaattgagacataaaatcactgattttagtaatgcctaagcgatacgccacgtcataaaaataagtatcgcatgactcttcaatagcacgataaacgtcaacatggccatgaccccaacgtttccagtcacgccatttatgttcaacgtttggaatttgaaaaaagcccggatcccacatttgtgtttgctcggtaacaagtccttcctctagcgccaaaatggccatatgtggtttaaccgtagaagctggtgcgtaacgaccttgtgtggttctatttattagagggcgatctgggttcaataactttttgtagtcgctactactgatgccatgaacaaataagtttgggtcgtaacttgggttagagtaaagagccagtacgccaccatcttttgcgtcgagcacaacgacagcgccgcgcatatcttttaaagcatgctgtgcaatttgttgtaagcctatatccagagtaagtaccaagtcatggcctggctctggtggggtcatgcttaaagtgcgaatgatacgacccctgttgttaacttctacactttgtgagccaactacaccatgaagtaattgctcatagtatttctcgatacctagcttacctatatcatgtgtagcacggtaatttgttgcttgatcatcggcttctaattttgccagctcttttttattgagtttggcaacataacctaatgcgtgagttaaagtatcaccataagggtagtaacgagctagtcgtgcttcaatactaaaaccagggaatttgtgctgattaactgaaaatttggcaacttcagtttcgtttaatcgtgctttaaggacttggctcttaaaacggcgattatgtttgatatcatctaaaaactctgctttttgttgttcactgatatcgataatttgttgaacatcttctaatgcttgatctaggttatctgtttcttctggaatgacttcaaggttatatacaggtttgttttcagcaagtaaaacgccatttctgtcataaattagaccccgatttggggcaattggaataactttgatccgattatcattagagcgtgtctggtagtcttggtggtcgataacttgaatgttatataagtttgataataagacaccaattaataaggtaacaaacacaaagcccacaaacgcgcggcgagcaaataaattagcttcagccgagtggtctcgaattgtgggtctgtgttttcgcatcgactaactactcgcggtgatatgggtgattattatttaagctccagccacgataaaggctttcggcaacaataatacgcactaaaggatgcggtagtgttagatttgataaagaccatttttgctcagaagctgcaatgcattctggtgcaaggccttcaggaccaccaatgagtaagctaacatcacggccatcaagctgccatttttccatgcttttagccagttgatgagtatccattggcttacctgttacttctaaagtaacaatgcgattgcctttgggtattgctgctaaggttttttcgccttcaagttgcaaaatacgttttatatccgcattttttccgcgtttaccggcaggaatttcaataagctcaagcggcatatcacgcgggaaacggcgctgatattctgtgaatccagtttcaacccatgctggcatcttagtaccaacggcaatcaattgtatcttcaaaatggtttacctatgtccttgcaagggttaaccccaaagtttctctagatcatagaagtcgcgagtttggtcttgcatgacatgtactactacatcacctaggtcaacaagcacccattcgccttcattttggccttcgtaaccaaggggctcttcaccagcgtggcgtgcttcttttgcaacgtgatcagcaatcgattgaacatggcgtttagagttaccagagcatactaacatatagtcggtaatatctgactttccacgaacatcaagttgcaccacatcacgggctttcatgtcgtcgactttatcaagggcaaatgcgagtagttgtttagaatccaaagtgttttctcaaaaataaataatcttaattgttattttatcacgcaggcagcatttattcatctgtttgataaagatgatgctttgcgatgtattgacagactgaagtcggtaaaagttccgttatttcactatttgaatgcagtttttttctgatttctcttgatgcggcatctatttgtaagccatttaaaaagaataacttacctgcaggttgttgctttagttcagcaaggttatcagtgtatgcctgttccttgtaatgagccaattcaccagcgacattacaggtttgccccggcctttgatacacgactatgtggcaaagtgtgacaatttcttgccatttaaaccatttgtcgaggctaatgaatgagtccataccgattaaaaaaataatgggcgtagtcgggtgctcagctcttaattcttgcaagctaagtaatgaataagaggcacctgaacgattaagttctctgtaatcaatcgtgaaataagggatgtcttcaattgcaagtttgagcatgttgatacggtgctcatcactgatccccggtttagctttatgtgcaggaatagcgcagggcataaaatacagcgtatcaagctgacactgtttaacgcattgctgggccatattgatgtggcctaagtgaattgggtcaaatgttccaccaaatatagcaatcattatacaactctaatctaaaacagggtggcaaggtaatggcattgccagtggttggcaaaatactaagcaaaggtgtgttaaggcttgataaggcgcaacaaggttgccttgtttgtaggcagcatcaaactcggctaattgtttgatgatttgctcaagagtactaatttgcaggcggtttaatgcctgctgtactgttgcttgctggtttttccaaatattaaactgccgatataagtcagtcatattggcaccgtttaggcgagcgtgttgcattgcaagtaagttagtggcttctttattaatggcccaaaagatactcattgcttctgtgttatcagtagcgagtttactcattactttgactgcttgacctgcattgccggttaataaagcatcactcaaatcgaagatatcaaattttgattgattaagaagaccttgcattacggcctgctggtctactaactcactgccatataatagagataatttttcaagttcttggtggcatgcaagtaagttaccttcagtggcatcaatcaggctttgttttgcattattgtgcaagtttaaatttaaacggtaacattgctcgtctagccaacggcttaaatggttacctgttaggggataacaaggtacaaataagccttgcttatctaaagctttgaaccatgcactgcgttgaacatcttgaccagctttagcacctttcaataccaaaatagtgtctggattagtaagttcaacaagttgtttaaatatttggctaccttgagtacctggtttttgctcgtttaagtcaaattcaattaaggtacgagcgctaaacagtgacatactttggtattgagctacaatttcttgccaatcaaaccctggcattagggtaaatttgattacctcgtcaaaaccttgctgtttggcggcttgacgaatttgcatgacacattgtgtaatttgatagggctcttcaccaaacaccatgtaaaaaggcgcaaggccttttttcaattggctaggtagttgatttgcataacaacgcattacagttgtgatagctcacgaacaattcgacgactggcttgcttacgaatttcgcttaatagcagctcaagctcttttgcttttgcaagggcattatctgggtcgtcttgatagttacgatacaattcaaagcgctggttaatggctttttgtccagggcgcttaagggtatagcttacactgtaggcaagttcatactcggcaacctgaccattatcaaataatgataagatttgacgctctaaacggtctttgtggatcattaactctgggtgtttaccaccttggctaagctcaactttactcgcaataagctctttttcgactaactcgaataatgctgacttttcatcatccccgaccagggtgatcactttcaagtcgtcaggcaagtttgaggctttctttaaatgaaagccacaacttgttagcagtaaacagactagcgcaagggctagtccgtttttcagtgcttgaagcgctgccatcttagttagcaaccacgttaagtagtttgccaggtacgtaaatcactttacggatggttgcgccatcagtgaacttagttacgttttcttcagcaaatgctaatgcttcaacttgctctttagttgcatcagcaggcactgttaacttagcacgaagcttaccattaacttgtacgatgattagcttctcatcttcaacaagtgctgattcgtcaacttttggccatgctgcatctaagatgtcgccttctttgccaaggtcttgccataattgatgacacatatgcggcgtgataggcgcaagcatgataagtaatgcttcaagcgcttcgttagcaattgccacatcttgtttatcggcaagcggtgctttaagtaacttgttcgagatttccataattgcagcgattgcagtgttgaatgtttgacgacgttctacgtcatcagtcacttttgcaattgctttatgaagttcacgacgaagtactttttggtcgttatttaatgctgacttatcaagcgcttgatagcctactgtttctacatcaacagcgtatttccaaatacgttttaagaaacgcattgcaccttcaacacctgagtcagaccattcaagggtttgctctggtggcgccgtgaacatcatgaataaacgcactgtatctgcaccgtactgggcgataacttgttgtgggtcgataccgttatttttcgatttcgacattttgctcatgcccgcagagaataccggctcgccatcttctttgtgccacgctttaacaacacgacctttgtcgtctgtttcagtttgtacgtctgttggcgaaatccagatatcaccgcctttctcatctttacggtagaaagtatctgctaataccatgccttgacatagtaagcgctcaaatggctcatctgaagttactaaaccaaagtcacgtaataacttgtggaagaaacgcgagtaaagtaagtgcaagatcgcatgctcaataccaccgatatattggtttactggtaaccagtaatttgcagcacctggctcaatcatgccttcgtcaaaacgagggctacagtaacgcgcgtagtaccatgatgattccatgaaggtatcgaaagtatctgtttcgtggaatgcaggtgcgccatttaccgttgttttagcccactcagggtcagctttgattggtgaagtaacaccattcattaccacgtcttctggtaagcgaacaggtagcatgtcttcagttgcagcaagctcgttaccgttctcgtcgcttaacataggaattggagagccccagtaacgctgacggctaacaccccagtcacgtagacggaagttcactttacgctcacctacacccagtgcttctagtttatctgcaacagcattaaacgccgcttcaaactcaagaccgtcgaactcacctgagttaactaacacgcctttttcagtgtaagcttggttgtctaaatcaacagtttcttcagagtcagctgctggtgcaataacttgagcaatctcaaggccatatgctgttgcgaactcgtagtcacgttggtcgtgtgcaggtactgccattacagcgcctgagccgtaatccattaatacaaagttagcgacccaaattggtacttgtttacctgttaatgggtgaatcgcgtaaaaaccagtggcaataccttttttgtccatggttgccatgtctgcttcagcgattttcgtgtttttacactcatcaacaaacatagctacagcgtcgctgtttttagctgcttcttgtgcaattgggtgaccagctgcaacagcaacgtacgtcacacccatgaaggtatctgggcgcgttgtataaacactgaatgtatcgtcgttatcagcacgcttaaattcgatttctaaaccttcagagcgaccaatccagttgcgctgcatggttttaacttgctcaggccagtgatcaagtttatccaaatcatctaatagctcttgtgcgtaatcagtgattttgatgaaccattgtggaatctctttttgttcaacaatggcacctgaacgccaaccacgaccatcaataacttgctcattggcaagtactgtttggtcaactggatcccagttaactgttgacatctttttgtaaactaagcctttttcataaagcttagtgaagaaccactgttcccatttgtaatattctggatgacatgtcgcaatttcacgatcccagtcgtaaccaaaacccagttgctttaactggttgcgcatgtaatcgatgttttcgtatgtccacttagcaggtgcagtgttgtttttgattgctgcattttccgcaggtagaccaaacgcatcccaacccataggttgcattacgtttttgccttgcaagcgttggaagcgtgatactacgtcaccaatggtgtagttacgaacgtgacccatgtggagtcggccgcttgggtatgggaacatagaaaggcagtaatacttttctttgctctcatcttcagtgactttaaatacttggttttcttcccagtaggcttgtacttttgactctatgtcttgcgggttatattgctcttgcatctacgattccagacttcttgcaaattaataaaaaattgtcgataaggataacccaaaatacatgctaatcacagcggcaaataggcgcttttattaattttgtctggaaatatattttcagggcaggttaacctatactcaactagaataacgattgatttttcatcatttttgaaggagtaaccgatggcagactataaatcttggctcactgatttaactaaatggattaaagatgtaaaagacaatgaattaaaggatgcaatagataaatttgttgaatcagagcaagcacttaaagatttaggacaagaaaagcttagccaatatcgagagtatcttaagcgcgatattgatcatatcaaagaaaatgatgagcattatgactcgttggcttggcttgaacttaaggaatcgctttggtacgagttatcgcatattgaagataaaacccagttagaatggcatgcccttaatcaagattttaaacacgatggtgtctatcaagaaggagaatggatagccatgggcacattagtatgtaaaaattgccaacatagttacgatgtttaccatgctacgcaaattactccttgtactgaatgtggcggtatttattttcgccgtaaggcattacaaccttaaatcagtgacgcaggcttttgctgggcgttacctataatgcccagtcaagactgggaaataagaagttagaatgacaaaaaaactaatcccattacctgtttctgcgctagcgccagagatttctgcaagccatgttgccacttgcatgcaaaacccgtatccagaagcactcccttttatcggccagcaacgagcacaaagcgctctcgacttttctctggggatggaacttccgggttataatgtttatgtgatgggtgaagcggcacacggtcgctacacgttagtgaaagataaactcacagcccattctaaaggccgcccaactcccaatgaatggttgtacgtaaataactacgacgatcaccgtgagccaattgcgctgtttatgcaagcagggcaatcgaagcagcttgccgatgatatcgattcgtttattgatgaagtgcttgatacttttcctgcggcatttgataacccagggtatcagcgtaagaaaaaatcaattgatcgcgagtttaccgacacctacgatgcagctataactgcagtagaaattgctgctcttgagcaaagcgtggctctcattgaagaaaatggtgtggttggctttgctccacttattgacggtaagcaactgagtgatagcgaatttgcagctcttgaagagccgcttcgtatagagttttatgaggtcattgaaaagcttgaagatgcgttaatcgaagcgctgattgagctaccacgttggaagcgtgaatcatcagaaaaactgcgtaaccttaaaaaatcaacagcagaacttgctactaaaccacttcttaaagcgcttgagcataaatatgcaacacatattggggttcttcgttatctaaaagatattcgtgaagaaatcattgatgcggtactagagtggctcgacgatgatgacaatgacgaaaataaagaagattttgaccgcaaaggtatgctcacagatttctttgcgccaaatattttagtggaatacaaagaaggcgatgctgcgcctgtagtctatgagccgaacccaacctttggcaatatctttggcaagattgaatatgcaacgtcgcaagggtcacttatcaccagctatcgctcaattcaaccaggtgcattacaccgtgctaatggtggttatttgatcatggatgcagagaaagttatgtctaacccgcaagtgtgggatggcttaaaactgtctttgaaaacccatcaaatcaaaaacgacttaccctaccaagacagctcagtaggaagtagctttacattacgcccgcagcttattccacttgatgtaaaaatagtacttttagggtcgcgagagctttattacaccataggtgaatatgacgaagagtttgctgagttatttcgtgtactcgctgactttgattactacttaccaagtagtgataagctgcagtatcagtttattaccaaggtaactgaatattgtcagcaaacacttaattgcactgtgaatgaagcggcgatggcgagattattaaagtttagttatcgccaagcagagcatcataataaactctcagctcgttttgctgatgtattagagttagtggcagaagctagtttttatgccaaacaagatgagcaaacagtgattgatgctcatcacatagacgaggccattgttggtaagcagtatcgaacagggcaaatctctgaaaccatgctcagtgatatcaaagaggggcaaattttaattgctactgaaggtcacgctgtgggtaaggtgaatggcttaaccgtgctgcacattggcgatacctcatttggtacaccagcacgcattactgccactgtgtacgcaggtgctgatggcgttattgacgttgaacgtgaagctgaactgggtaaagccattcactcaaaaggggtgatgctattaaccggttacttaggtaacaaatacgctcagcaatttagcctgacactcagtgcgaatatcgcaattgaacaaagctatggctatattgatggtgatagcgcctcactggctgagttgtgtgcgcttatatcagccattactaatttacctattagccagtctatcgcactgacagggtcaattaaccagcatggtgatgtgcaatcaattggtggtgtaaacgagaaaatagagggcttctttaagctttgtaaaatgcgtggcttaaccggtgagcaaggggtgattattcctaaatctaatcaagtgaacttggtgcttgatgatgaagtactcgatgccgttgaaaaaggccgctttaacatttatgccgttgaaaccgttgatcaagcattgagcttattaatggataaagacgcaggtgaaatgaccgcagaaggttaccctgaaggctctataaacgcgctagccttagcaaggcttgccaatattgctgatatcgtaaatggcgacaatgatgatgagaaggacgcagaatgattaatttattacttttactgatcatcggtattttttgctttttaatttttaaaaatagcaaaaaggcgaagctacaagcccttgaaaatgaaaaactagcggcggattttttagcgaacaatagtaaagccgacgatgttcatgaaacagcatctgggctgcagtacaaaattgagcatcgcggcgacaatgaggcaaaaccaagtgccaccagtaaagtcaaggttcactatcatggtacgctgttagacggcagcgtatttgatagttcagtggtcagaaactcgccaatcagctttggtttaaatcaagtcattgctggttggaccgaaggcttacaactaatgagtgaaggggataagtttaccttttatatcccaccgcagcttgcatacggcagtaaacgggtaggcagcattccagcaggttcattgctaatatttgatgtagagttgattaagatagaatcttaaaattttaaaaggcttcatattgaagccttttttatttgttatttcttaaccctgataaacacagccacagcactgagtaatatcaccacaatccataccggccaattaccatattgactataaagactatcgcctttgattaaggtgatattggcttcaagtacatcagctttaaattgcggcatgctcaactgtgatttagcaatagggtcgtaaacggcgctgataccattattcgttacgcgaattagcgggcgttgtaattctagagcacgcatacgggctatttgcatatgctgatgcgggccatgagagtcgccaaaccacgcatcattactaacggtgaataaaatgtctgaatcactgcgataattaccacgcactaaatcagcaaaagcaatttcataacaaatagcgggtaaaatatgtaagccgttcgcctgtagattgttttgaacttcatcgcctcgagtaaatgacgacataggtaaatcaaacagtggggcgattggacgcagtaattcttgaaatggcacgaactcaccgataggcaataattggtgcttttgatagcgatttttacctaaatactgataatgaccttcgctatcatcttgctcttttttacctaatacaatgagggtattaaaaatattacgggtgtcgtattgataatccacgataccggtgatcagggctgtgttgttaaaagcagctgcactatcaagaccggttaggtattgtgttgatagggcttcaagctcagggacagcagcttctggccaaacaataaggtcagcattccaatgaaggcgcgtcatgtcttggtatttactcatagtattccaaaactctgacggttcaaatcgtaaatgctgtttaatgttcccttgtactaaaactgttttaattgttttatcttgatactgtaaagcactattactcgcaattacgtataagcctgccaacaaggtcacagagccgattaacggctttatgtctttacctagcaaacgaaagagtgaaaacgcgatgagcacgcaaacaagtgttataccaaactcgccaatcacaggggctaaaaagttcagtgggctgtcggtttgtgtataaccaaagctcaaccaaggaaagcctgttagcaaagtgccacgtaagtactctgtaaccgcaaagttggcaagcaacaagcagataaagctatagggccctttagcaaggcgggttgtcaaccaagcagctagtgcaggatacaaggctaagtaagcgcaaagtagcaccatcaatgaaatcgatgcaattaatggcataccgccaaaggtggctatcgatacatgcacccaactaatacctgcaccaaaccagcctaaaccaaagataaagccatacttagcactttgcttagcggccgatttaccatttgcctgcggattaatacagtagataagtatgccaagagagagaaaggcaatataccaaagattataaggggcgtagcttaaggttaaaaagaggcccgcaatgagtgcgagccaggcttttttatcttttgcaataaggcttagcttagttagcagtttcttcactgtcgttatcatcagccttaggaatggtgacttgcaattgtaagatgcgacggttatctgagttggtgactttaaattgcaggccatcaatatcaattgtttcaccacgacttggcatatgaccaaatgcgtgtaaaacaataccacctatggtgtcagcatcagaggtgctgtaaccggttttaaaatactcgttaaagtcatcaacttcagtcagtgcttgtactgcataaacgtgtttagctacttgacgaatatcttgttggtcttcgctttcgtcgtgctcatcttcgatttcaccaacgatgatttcaagaatatcttcgatggttactagacccgacacgccgccgtattcatcgatgacgattgccatatggtatcgctgttgacggaattcgttaagcagtgtgtcaacacgtttgctttctggtacgactactgctgggcgtaaataatcacgcaaagaaggtaactgctcatctttgtttaagataagtggtaatagatcttttgctaataaaataccttcaacatggtctttatcttcacacaccactggaaaacgtgaatgtgttgagtcaaccatcataggtaacagttcttcaagtggtgtatcaacctctaaggtaaccatttgcgagcgagggatcatgatgtcacgaactttaagttcagatacaccaagaactccttcgatcatttctttggtttcagggtcgataaggtcgcgttcttgcgcatcggcaattacttcaaccagctcttctttattctggggttccccttgcaacatttgggttattctgcccaaccaagttttgccagaagaaccctggctagattgcgagttgtcgtcgctcattgcgtctaattgctccgtaaatttaaatatcgtctcgatatgggtctgcgatgttcagatcagcaagtaattgcttttctatgctttccatttcgagtgcatcttcgtcctttatatggtcaaatccaagtaaatgcaagcatccatggatcaccatatgggcaaaatggtcatgaaaggtcttttcttgctcaattgattcggccaaaacaatggccggacaaatgattaaatcacccactaaaggtaactcaatacccggtggtgcttcaaatggaaacgataagacattagtcggtttatcttttccacggtaatcattattgagctgctggctttgtgcttcgtcgcttatgacgatagtaagctcagcgtcttcacggtagttactaagggctttatcagcccatagttggaattgttcaaagctaggtaagtcgtcaaactcacaggctatttgtaaatctaattcggtcacgagtttgcttcttgttggtttgcttgtgcttcttttgcacgttgcttttctgcgcgctttaaacgctcagcttcatcatttcgctcataggcttctacgatacgtgcaacaacagggtggcgcacgacatcgtgtgattggaagaaattaaaactaatttcatctacgccgtttaatacctcaatagcatgacgaagcccagagcgagcaccacgtggtaagtcaacttgtgttatatcacctgtgatcactgcttttgaattaaaaccaatacgggttaagaacattttcatttgttctgcggtggtgttttggctttcatcaagaataataaaggcatcatttaatgtacgaccacgcatgtaagcaagtggggccacttcaatgatgtttttctcaattagcttttctacacgctcaaagcccagcatttcgaataaagcatcgtaaagtgggcgtaagtacgggtcgattttttgacttaaatcacccggtaaaaagcccagtttctcaccagcttcaacagcagggcgcgttaataaaatacggcgaatctcttgacgctcgagggcatcaacagcagctgcaacggctagataagttttacctgtaccagcgggaccgataccaaaggtaatatcgtgatgcaggatgttagcaacataaacgccttggttatcgttgcgtggtttaataacgccacggcgtgttttaatcaccatgtctttaccgtacacgcccgggttttcatcttgctctagggcattcgattcgctaattgctaaatgcactgcatcaggttcaatttcgcctatttgaccacgaataggttgagtgtcaatgtaaaggttttttaagatttcaacgctggctgcggcgcaatgaagtttacccgtgactctgaaaaaattatcacggtgggcaatttcaacacctaggcggcgttcaatttgtttaatgttttcgtcaaacggaccacataaagaagagagtcgtttgttgtcggcaggttctaaataaatctctaatgtttttaattgattactcaaaattacttcctattcatgggtgctggcagtgccagcaccagtgtctccctaaggtacgaaagtagcaacgccaatttcgttaggggcagctgcggcttcagcttcggcagctttatttaaaattgctgatggcgccacatcacgacgtaaattcatctctgattctgtacgaattaattcaccacgtaaagagtttggcaacgcttcagtaatacgtacatcaacgaattgaccgatcactgagtgagggccttcgaagttcactacacggttgttttctgtacggccacgtaattccatcgggttcttcttagaaggaccttcaaccaggatacgttgttcagtaccaaacatttggcggctaatttgctgcgccatttgcgtgatgcggttttgtaataggtataaacgctcttttttctcttgctcagtcacatcgtctggtaaatcggcagcaggtgtgccagggcgcgcactgtagatgaagctaaagctcatatcaaaaccgatatcattgataaggttcatagttgcttcaaaatcagctttactttcaccagggaaaccaatgatgaagtctgatgacatgcttaggttagggcgaattttacgtaatttacgaatcgtcgatttatactcaagcgcggtatgaccacgtttcatcaggttaagaatacggtcagagccactttgtactggtaagtgtaagtgatcaacaagctctggcacatcagcgtaagcatcgatgatgtctggtgtaaactctaccgggtgcgaggtggtgtaacgaatacggtcaatgccgtcaatcgctgcaacataacgtagtaggtcagagaagtaacaaatctcaccgtcgtgtgtttcaccgcgatacgcatttacgttttgacctaaaaggtttacttcacgcacgccttgctctgcaagttgcgcaacttcaaggagcacatcatctaaaggacgacttacttcttcaccacgcgtgtaaggtactacacagaaagtacagtacttagagcaaccttccatgattgatacaaatgcagtaggaccttctgcttttggctcaggtaagcggtcaaatttttcaatttcagggaatgaaacgtcaaccacagatgtgctgtcgccactttgcacttgcttaatcatttctggcaagcggtgtaatgtttgcgggccaaagatcacatcaacaaatggcgcgcgttggcgaattgagtcaccttcttgcgatgcaacacaaccaccaacaccaatgattaagtctggcttgtcatcttttaataacttccaacggccaagctgatggaacactttttcttgtgccttttcacggattgaacaggtattgagtaagatcacgtcagcgtcttcagcttcttcagttaactgatagccgtttgtcgcatctagtagatcagccattttctgagagtcgtactcgttcatctgacaaccccaggttttaatatgcagctttttactcattgaaatatagcctcgttttcaattcggtagtgacacaaaaatgtgttagaaacaggattaagtggcaattatgccgacttaaaggacgcgtattttagctggatacccgcacagatccaagtatagttttaatctttgtggtgtgaaatcaaacaagtccctgatttgaaattcttaagtattaaatgcactgacactgtttattgaattacgttacaatttgccgggtatttaaatagccaaatgagcgaatattaaatgaataaaaataagataattgttgttggaggtggcatggtaggtgctgctacagccataaaattggcgcagcaggggagtgatgtcacgattattgaaaaacaccttattgatgcggatagtattcttagctcagataaagtggatattcgtatttcggctattaatcgtttttcagagcacctacttgatgagcttggggcaatgccattattgcgtaaaaaccgaatcgcaccttatcaacaactagaagcgtatcaacagcaagacgagagcttattatttgattgtaaagatattggcgagacacatttaggccatttaattgaaaatagcttaattcaggcgagtctatggcaacaatttgctgattacaatattgaggttatcgagcaaaagactcctgtaaccgatataaatcaaactgacgattcaatcactctgcattatggtgatacacactatacggcagatttagtcattgcggctgatggtggtcaatcacaattgcgcaccaaagctggattaggtgtaactggttggcagtatgctcaacattgtatgggtgtattaataaaactggatgctcctcaacaagtaaaaacgtggcagcaatttactccaaccggacctgtcgcgtttttacctatgcaagcaccttatgcaaatttaatttgttaccacgacgcagcagttttaaagcaatggcaaaaactttctaatgaagaacttaaagcaaagctcattgcacatttccctgaactaccgggtgactttgaattacttgagcatgctgttttccctcttgccagacaacacgccaatgattactcacaagggcgtttagtacttgtgggtgattcagcgcacacaattaatcctcttgcaggtcaaggcgtaaacttaggctttcaagatgtggttgcattggcggatattttggaagatcaagaagacgtgggtcaacatcaattattaaaacaatatgagaaaaaacgtcgtcatgcgaatttactcatgatgagtatgatggatgcatgctattttggtttttcaaatgaaataaaaccactcagttgggcgcggagcaagttcttgaaattagccaataataaaggccctgctaaaaattgggtattgaaatatgcgataagcgggacattaagttagaacgccatattgatattttttaattttgaagtacaagtgccttggtagcacttgtactttacgagctatcttaattccaagtgccacttctagagtacatatactctgcatcagcacaccaatttacatcagcccaagtgtagtcggtgtaataaatcttatctacacatccccttactgagctttcaaccttgaatacatcgactatacaagtagtgccagtacaatcagcaacgcttgcactattataagtaccactaaatacccactcaacgcgtgaaacatcttttgaggtattaactttgaaagcaacctttggtgcccagttaggattagtctcaccaccaaaacaacgattctgggtgtagttatcgtaggccattgtatctacgtagcatgatacagagtttgcaaaagcattagcagtgaatagagcacttattagagttaaaattgtaaataactttttcatataactttccttattagagtgttagctcgttttttgagcatatttagagtatcaataagggtacttttgtcaataaaaagttgcagaaaagttaatttttgtggttctttattattgaagcctattttttcagttggaaattaggtatttgaagttagctatatgaagttagctatatgaagttaagtatatgaagttaagtatatgaagttaggtatatgaagttaggtatatgaaatcaggaactagaaattagaaagggaagtaagttggctgggataccaggatttgaacctgggaatggcaggatcaaaacctgctgccttaccgcttggcgatatcccaacgctaaacttgaagagttttagttctacttaagaacatggtgcggaaggagagacttgaactctcacaaccgaagttactggaacctaaatccagcgcgtctaccaattccgccactcccgcacatagtgtgatgcaagtgtatagtaatggaacctaaatccagcgtctaatcaagacaccagccaattccgccactcccgcatcatagggtttgctaatttaaactcttagcttgagttttcttattcactctcttggtagagaaagtggctgggataccaggatttgaacctgggaatggcaggatcaaaacctgctgccttaccgcttggcgatatcccaacaaagaataatttgatagtttgagttcttatcaagaacatggtgcggaaggagagacttgaactctcacaaccgaagttactggaacctaaatccagcgcgtctaccaattccgccactcccgcatcatttgtactaaatgtactggtagttattttaagctcttcattgagcattcttcgtcactttaagaaagtggctgggataccaggatttgaacctgggaatggcaggatcaaaacctgctgccttaccgcttggcgatatcccaacaaagaataatttgatagtttgagttcttatcaagaacatggtgcggaaggagagacttgaactctcacaaccgaagttactggaacctaaatccagcgcgtctaccaattccgccactcccgcatcattcgtactaaaagtactggtagttattttaaactcttcattgagtgcagcttaaactcctgcagagccattctaaagaaagaatggtggctaagacgggatttgaacctgtgaccccatcattatgagtgatgtgctctaaccaactgagctacttagccatcgtggctgggataccaggatttgaacctgggaatggcaggatcaaaacctgctgccttaccgcttggcgatatcccaacaaaagcttgatagttttagttcttatcaagaacatggtgcggaaggagagacttgaactctcacaaccgaagttactggaacctaaatccagcgcgtctaccaattccgccactcccgcatcattcgtactaaaagtactggtagttattttaaactcttcattgagcaacaagaaagaatggtggctaagacgggatttgaacctgtgaccccatcattatgagtgatgtgctctaaccaactgagctacttagccatcttttttgttagcacttcatcgctgagtgcggggcgtattatgctgatatgacctaaatccgtcaacaccttttttgcaaaaaaacgcttatcagtgtttgtttgcattaaaattaagctaagtggctaaatttcatttgaattgctgtttttttgactgctatttaccaatttaaaactgcaatgtgttttgtaactgttttaatactgattttaagttgcttgattttcaaacaaaaatcaagcaacaaaaatagataatttctttttataggatgtttgcttgttaaaaacaacagaagaacttatttcttaaagtgattgcagctaaaagagcactcgatttcgatctttgtttctttaagtaaagacgtggtttggtagtaaatcaactaacagcggaacaatccagcactaatatccttaatcctttgtcaaattatgtttggctgtatcggtgctaataccaatttgccaagttcgtgataagcgtccattgcttggaatagacggttaaatctagcaaatagctaggactggcaaatgatatggtggttagtagcaagtttaaaagatgataagcaataaaaaaggctcgtagtaacgagccttttaaaattttatcagcgaagcagcttatacattgaataagaagttcattacatcgccgtctttaacaatgtactctttaccttcttggcgcattttacctgcttcttttgcaccgctttcacctttgtactcgatataatcatcaaaagcgatagtttgtgctcggatgaagccacgctcaaagtcagtgtgaattttacctgcagcttgaggcgcagttgcacctactggaattgtccatgcacgtacttcttttacaccagcagtgaagtaagtttgtaacttaagtaactcgtaaccaccacggatcactaagttaagaccaggctcttctaaacctaggtcagccataaactctaacttgtcttcttcttcaagctcagacagctcagattcgatagccgcacaaactgggatcacaacggcatcttctgcagcagcgatttcacgaactttgtctaggtatggattattttcaaaaccatcttcagcaacgtttgcaatgtacatagtcggtttaatcgttaagaagttaagtggcttaattgctgctttttcttcttttgttaactctaatgaacgaagagttaaaccttcatcaaggtgtgcttttaccttttcaagtactgcattttgctctttagcgtctttatcgccgccttttgcctttttagcgttacgaacaagtgctttatcggcactatccatatcggctaatactaactcagtattaataacatcaatatcatctgcagggtcaatagtgcctgctacgtgtacgatgttctcatcttcaaagcaacgaacaacatggccaatcgcgtcagtttcacgaatgtttgcaaggaactgattacctaaaccttcacctttagatgcgccttttactagacctgcaatatcaacgaattccatcgttgttggtaaaatacgctgaggatttacaatagcagctaacgcatttaagcgtgcatcaggaaccggaaccacgccagtgtttggctcaatggtacagaaagggaagttagcggcttcaatacccgctttagttagtgcattaaatagtgttgatttaccaacatttggcaaaccaacgatgccacatttaaaacccatagtaagataccttgtgtaatttcaaataaacgatttaaggtttaaatgaatgtagtctgttttgtgcttttaacacaccatcttttgcaagaatttccatacaacgaactgcttcgtcaactgcggcatccattttttcttggtcttctttcgcggctttacccagtacccagcccgtaaccatttcacggtgaccaggatgaccaatgccaatacgaaggcgcatgaaatctttttggtttgccattttcgcgataatgtcttttaaaccattgtggccgccatgaccgccacctttttttagtttagcaatcccgggttcgagatccatttcgtcatgtgcgacgaggatattttcgacaggaattttaaagaaattagcgagactactcaccgccttaccgcttaagttcatataagtagtagggatcagtaatttaaattcttggccttgaattatcactttgcctgttaggccatgatatttaggatcgtgtttgagtgtgcagttataacgtgcagcaagttcttcgatgaaccaggcacctgcattatggcgtgtgtttgcgtattcggggcctggattagccaggcccacaagcatttgaatagaattcaaggtgttgacaccttaaaaattattctgcagcgtcttctgaagcttcgtcttcagcaggagcagctttgttagctttaacagtaacaattgactgatcgtggtctgcgcctttagctagctcaacagatgtaacacctgctggtagtttaaggtcagaaaggtggattgaatcaccagctactaagcctgcaacgtcaacttcaacgaactcaggaagtgacttaggaagacacgtgatttcgatttcagttaattggtgaacaacagtgttacctgctttagttactttctcttcaccgatgaagtgtactggcactttagtgtgaagtttgtgagaagcatctacacgttggaagtctaagtgagtgatcttaggcttgaatgggtgacgttgaatatctttaaggatagcttcaactgactcgccaccgatgtttaaagtaaggatgtgcgtgtagaaaccttcgtcttcttgcgctttgatcatatctttgtgtgcaagaacgatagatgcagcttctttgtcagcaccgtaaaggattgcaggaactttatcttcacggcgtaggcggcggctcgcaccagtacctgtttctgtacgtaattctgcattgtatgtataagttgacataatgtctccaataattaatagtcttagggcctttgcgaccaaggtccccagccaaaaggcgcgctatcataccacccctttcggggaaaataaataacgactacaaaaaaagcacctagacggtgctttttgaatatcttcgcgttgttgattagtgttcaaacatcgctgagatagattcttcattgctgatacgacgaattgtttcagcaagcatatctgcaagcgtaagcactttgattttatcaattgctttaagctcatcagataatgtaattgagtcagttacaatcacttcgtcaattactgagttacggatgttttcagcggcattacctgaaagcacagggtgagttgcatatgcaaatacacgtttagcaccatgctctttaagagcagcagcggctttacataatgtaccaccggtatcgatcatgtcatcaacgatgatacagtcgcggccttcaacgtcaccaataatgtgcattacttgtgaaacgtttgcttgtgggcggcgcttgtcgataatagctaggtcagtgtcatttaatagcttcgcaatagcacgagcacgaacaacaccaccgatatctggagaaacaacaacaacgtcatcgaagtcgcgttctttcatatcttctaatagcactgggctaccgaatacgttatcaactggtacgtcgaagaaaccttgaatttgttcagcgtgtaaatcaaccgtcaatacgcggtcaacaccaacactagaaaggaagtctgcaacaactttagcagtaattggcacacgagcagagcgcacacggcggtcttgacgtgaataaccaaagtatggaataactgctgtgatacgaccagcagatgcacgacgaagggcatcaaccataacgataagctccattaagttatcgttagtagggttacaggttgattgaatgatgaaaacgtcagaaccacgaacattttcattaatttgaacactgatctcaccgtcactaaaacggccaacaacagcatcgcctaattcaatatacaaacgttttgcaactttttgagctagctcaggtgttgcgttaccagcgaagagcttcatgtcaggcacggtagggttcctcaggcactgaattttgggactaacaggctatggtagacaccaaagcaggttaacatttacttgtacgttacttcatagcaaagtgagcatttaatgctttatgagcaggtgaaagtgtagcactacttgcaacaaaacctgtccatttatctggtaactgagctaaaacttgttgtgcttgtgcctgggttgaaaactcagcaaagcaacaagcgcccgtaccagtcatctttgacggggcgtattttagcaaccactgcaggactttttcaacctcggggcagagctttttaaccaaaggctcacaatcattgcctaaattttccgtttgccagtctacttttaacttgggtgtgtcacgttttaaatcaggatgggtaaaaattttcgcggtgctgacatgctccccaggatgtattacacaaaaccaactttgcggtaattctacattttctagttgctcgccaataccatgagcaattgctgtgtggccatttataaacactggtacatcggctccaagcgtcaccccaagtttagctaattcttcgagcgataaatcgcactcccacaacttattgagagcaagtagggtcgtagccgcatcggatgaaccgccaccaacaccaccgcccatcggtaaacgttttaatagctcgatagtcgcaccttgttggcaaccacaatgctgttgtaataaacgagctgccttatatataaggttgtctgttaaagcaatgccgtttgtatcgccaatgactgtgatatcgggttcatgggtcactgtaaatgttaagtcatcaccaaattctaaaaaggtaaataaggtttcaagctcatggtagccatcatcgcgacgaccattaatatgcaaaaataggtttagtttagcgggtgcgattaatgtgaaagggggctttaaaatgtgtgtcatgattaatgtaactgccaatcattaagttgaattttaatacgaatatgttgattttttaaagtcagtttttctggtaaccaataaccatcttgcttgcggtaatttgcataggtaatgtgccattgttggccattctctgcttgccaaagcagtgtttttaaacgaccttgctcatcgaatgatgcttgctcattctgtgcagtaccttttagccattttgcggcattatctaatggaattgaaaagcctgttaaccggtaaagtagtctagatgcatcctgatctgtgtaagtgttgccgtcatactctaaaacagcaccttgagggttttgctgtaacgacagaatgcgtgtgccaataaagctagttaaaaccatgtcactgttgcgctcatcatgttgccaatttaaattggctgattggcgttgctcggtgctgataaacgccattttaccttgtacttgccactgggtctgttggtctaggcgggttttccaatcagggtaaatgtaatcaaccgttgaaattttttgcgcacaaccgctgataaataaaaaaaatatgaataaaatcaaatattgtttaatcaaatgtcgttccttactttccatattccgctgatttttggtaaaattaatgcctttacagctgggcttagcaatatttggtacatatgaccatcgtagcacttggtataaatcacaaaaccgcatccgtagaattacgcgaaaaagttgcgttttcgcctgagcaaatgtcggaggcgttacaacaattaagtggccatgcgcatttcaatgaagcggtcattgtttcgacctgcaaccgaactgaaatctattgtagccttgccgagcgtaattcccaaaccttgttgcactggttagccagtttccacggtttggatgaacaagaactgagcaacaacatctattatcacgaaggtaccgaagccattaatcatttaatgcgagtatcttgtggtttagattcgctggtgcttggtgagccacaaattttagggcaaataaagcaagcctatcacaatgcaaagactcacgatgcaatcggtgtaacattcgatcgcttgtttcaaaaaaccttttcggtagcaaagcaggttcgtactgaaaccgatatcggtgccagcgctgtttcggttgcctacgcagcggttaatttagcaaagcacatatatggcaagttagataaaaccaatgtactgcttattggtgctggtgaaacaatagagttggttgctaaacatttgtaccaaaataatccgcaaaaaattactgttgccaacagaactattgaacgtgctaagaccctagccagcgatgtcaacgcggatgtgattgcacttgcccagctacctgagcgccttcatgatgcggatatcgtaattagttcaacggcaagtaccttacctattattggtaaaggggtggtagagcaagcgctaaaaaagcgtcgccataaaccaatgttatttatagatattgcagtgccacgcgatatcgagagtcaagtaggcgaattagatgccgcctatttgtattcagttgatgacttacaagccatagtaagcgagaatatcgccgcccgagagcaggctgccgaacaagcgcaaaccattattcgctctcgtaccgatgaatttgctatgtggttgcgttcactcgattcggtggatttgattcgccattatcgcaacgatgtacaagatataaagtcagaacttgtcgaaaaagccctcagtcagctgcaagcaggcaaagaggcagaaaaagttatactcgagttggcaaataaactgaccaaccgcttgatgcacgcacctacccgtgccattcaagatgctgctaaaaaaggtgaagcagccgagttaagccaattaaagaaaatgttaggtattgatcaggaatagtcgttaaatgaaagagtctgtttatagaaaattagaaaccttagttgagcgttatgaggaagtgcaagcgctgctaagcgacccctctgtgatcagcgaccaaaatcgctttcgtgccttatctaaagaatactcagaattagaagaaatcgtaaaagcgtttttagcctatcaacaagcacaagatgatgttgctacggctgaagagatgctaaaagactctgatcctgacatgcgtgaaatggcgcaagaagaatataaagaagcaaaagcacaaattaccgaattagaagacgaaatccaaattctgatgttaccaaaagatccgaaagacaataataatgtctatttagaggttcgtgctggtaccggtggtgatgaagctgctattttcgctggtgatttattccgtatgtacagccgctacgcagaaactaaaaagtggaaagttgaagtagtaagtactaacgaaggtgaacatggcggttataaagaagtcatcgcgcacatctctggtgaaggcgtgtatggtcagctgaagtttgaatcgggtgctcaccgtgttcaacgtgtaccagagactgaatcgcaaggtcgtgttcatacatctgcttgtaccgtggcagtgatggctgaaattcctgaagcagaagcaattgagattaaccctgcagatattaaagtcgatacgttccgtgcatcgggtgctggtggtcagcacgtaaataaaacagattcagcaattcgtattactcacattcctacaggtgtggttgtagagtgtcaggatgaacgttcacagcataaaaaccgtgctaaagcaatgtctgtacttggtgctcgtttacaacaagctgaagatgaaaagcgtcaagcggctgaggcgtcagaacgtcgtaacttagtgggcagtggtgaccgctctgagcgtatccgtacttacaactacccacaaggtcgtattacagatcaccgcattaacttaacactttatcgtttaaatgaagtggttgccggtgatttaggctgtgtcattgagccactaatgcaagaacaccaagctgacttacttgctgcgatgggcgatgaataatcgtgccgcaaagcatagaacaagcacttgttactgcgacggcgttattaacgccgagcagtgacagcgccaagcttgacgcgcaagtattgttattatccattcttgataaaccccgcagttatttattcacttggccagaaaaacaacttaccgaacagcaacaacttgcttttgaacaagcatgccagcgccgcttaaacggcgagccagttgctcatattgttggctttcgtgaattctggagccttcctttaaaggtcaatccaacaaccttgatcccaagacctgataccgaaaccttagttgaatatgctttaggtttagaattaccagcaggtgctaaggtgcttgatttaggcacagggacaggggctattgcccttgcgctagccagcgaaatgccaacttggcaggttactggagtcgatagggtcgctgatgcagtcgcactagctgaagaaaataaacaacgactaaacattcacaatgctcattttgcattgagtaattggtttagtgcagtaaaaaaagaaaagtttgacctaattgtcagcaatccgccgtatattgaacatgatgatgaccatttgagccggggagatgtgcgctttgaacctttatctgcattagtcgcagatgatgacgggatggctgacatcaaacaaataattactatggcgcgtgactatttagcaacaaatggctatcttttaattgaacatggctaccagcaacgggcaaaagttcaagatttttttgcacaaatgtcgtatagccatatacttacaattaaagatcttggcggtaatgaccgtgtaacacttgcacaatggcctaaataataacaaaaaggcttgtgcgtacatagcctttgaggatcccttataatggatgattttttgttttcggatgaagcacttgatgaagtaaatgaagtgctccaaggtagttggaaagtcatcgtggttgatgatgagccagaagtacacgccgtaacaaagcttgcgttgagtgacttcgaatttcaagacaagcgtcttgaatttataagtgcttattctggggaagaggcaaagcaagttatacaagagcatcctgatgcggcaattgtgttacttgatgttgttatggaaacggatgatgccggcttaaaggttgctaaatttatccgtgaaactgctaaaaacaatcatattcgaatcatcctaagaacaggtcaaccgggccaagccccagagcgacaagtaatagtcaattttgatatcaacgattataagtcgaaaacagaattaacagcacaaaagctgtttacggtagtgatgtcgagtttacggtcgtatcgagacattttatcgattgagcagtcacgcttgggccttgaaaaaatcattaaagcatctcgcgatattttttctactcactcacttgagagcttcatcgaaggtgtaatgcagcagcttacttctttgctcggtactgttgaccaagcaatgtattcaacaagtttagtggctagtaacccgcaggataaccaaaagaagctagtggtgttttcgggcagtggtgagtttgaacgcagtgagggtaaagcgattgaagatgtgcttaatgatgagcaactgcaagcctgccaacaagctttaaaagaaaaaaccattgtttatcgagaaaactacttatttgcctattgttgcagtgagttcaatcataactcaatgttatttatatcaggtattccaaaacaccttaccgacacacagcgccatctaatcgaaattttttcgcaaaatgtacagttagcctacgaaaatgtgcaactacaatcagaaatagaagcaacacaacaagagctagtgtttaggctaagcgaagcactcgaacaacgctcaacagaaacaggcaaccacgtaaaacgtgtatcgcatatttgttatgagctggcgataggctatggcttagacaaacgagaagcagagttaattcgccttgcagcgccacttcatgatgttggtaaagtaggtatcccagattctatattaaacaaacctggaccactgacggatgatgaatggtgtgtgatgaagcagcatgctgaaaaaggccatagtattttgaaagactctaaacgagaaattgttaacgttggagctactattgctttatcgcatcacgagcgttgggatggtgcagggtatccaaaaggtttaaaagggcaagatattcctatagctggccgaattgttgcacttgcagatgtgtatgatgcacttcgtcataagcgctgctataaagagccttggtcgcttgatgatgttataaaagaaataaacgcacaaaagggtaaacaatttgatcccaagttgattgatgtgtttaatgaacgcgttcaagaattagaagacgtacttgtacgttatccagattaattaaaacaagtttagggtcgtatggattatttagcagtaaagcatactcacatgttatttgccgtgttgagtatagtattattttatgttcgctctttttcacgtttaaagacgggcgctttagcaaaaaataaagtggtgtttattggtagtcatagtatcgacactttattgcttgtatcagccgttgcattaattgttatggcgggctttaaccctctagagcaatcgtggttattagaaaagatcattctagtgatcctttacattgtacttggcgttgttgcagcaaaacaaagcgcacagggtatgaaagtcgctttacttgcgatcaccacagtcatcttattagcaattggctatttagcttctgctaaaacagcacttcttctgtaagaatctctaagcggtattttgatggcgtgcgccatcgtaccgcttttttgtatctcatcgctcagtattggtaacttaggtcaaaagtaggtaaactagctgctcttttttgaaatagatgttgcagtataaatgaccattccttggtttgaagatcaaaatgaatcctatcaagatgaagccttcgatgcatattcatctaaagtgctttatcgttgtattgatgctgaattaaagtgggatccgcaagtagatttatctgcttgctacgagacactaaatcaacttgaagacacggtagctactttttgttctgaaataaaagagccgcacgaacgtcttgataaattactcgatacgttttatcaacactggttatttagtgtttctagtttaaaagtccctgaatatacattaaatagttttcgctatacgattactatgcgtagtggcacacaaacaacgttggctattttactttgccacttaatacagcatgctgaacttgacgcgagtgttaccttgagtcaaggagaagtgcatgtacatgtaggtataagtgatgaagagggctacttaattgagcctagtacaggccaacaaagttggtatattaccccagaaaacgcgtgcgaagaaaatggtgatgaacaagagccgctggagctagtatttgatgaagagctatataagctttacctagctcaacaaaaatggtcgtttatcagcgaaagtaaatttggtcatgcacttcattgtgtagagatgctcatggaattattaggggatgacccttatgagcgtcgtgatcggggttatcttcttaatcagttagattgcccaaaaatggcaagagatgatcttcagtattttgtgaatgaatgcccagatgatcctgctattgaaataattcagcaccaaattgctgaaatagaagacaataataatacacaccactaatttaaaggaacatttatgactgacgcccacagtgcgctaattaccaatgacgcagtcgtacttggtttgcttgccgttattttggggtttatttttaaaacctctcacagtaataatgctgcctgccaaaaattttataagtatgtacccgcattactactttgttattttttaccttcgttactcaatacctttggtattgttgatggccactcttcaaatgtttattttgtggcatcacgttatttactgccagcttgcttgatattgcttactattagtattgatttaaaggcaattcttaatcttggtccaaaagcactaattatgttcttaacgggtactatgggtatagttattggcggaccgcttgctattttagtgatgagtgcagtttacccagaggccgttggcggtcatggccctgatgcggtttggcgcggtatgacaaccattgctggtagttggattggcggtggtgcaaaccaagcttcaatgaaagaaatgtttgaggtaggcggcgacatcttctctgcaatggttactgttgatgtgattgtggcaaacttatggatggccgtattgctattaatggctgcaaatcataaagcgattgatgcaaaaacgggcgcagatacccgtgcgattgaagagcttaaagagcgtgtagagaaatatcacgcagagcatgcacgtatgccaaccttaaatgattacatgacgatcattgctattgcctttggtattactggccttgcgcacttttgtgccgactttttaggtccgttttttggcgctaacttcccttgggcgcaagagtatagtttaaacagtaaattcttttggttaatcgttatctcaaccacaattggtattagtttatcgtttactaaagttcgtcatattgaagcttttggcgcttcaaaagtagcatcaagctttctatatatccttgttgcttcaattggcttacacatgaatattaccgcgatttttgactcacctatgtattttgtactaggtgtgatttggatgattacccatgcaagcttaatgcttattgtcgcgaaattaattaaagcaccattgttttatatggcagtaggctctcaagcaaatgtaggtggcgcagcatcagcacccgttgttgcatcagcattccatccgtcactggcgccagtaggtgtattacttgctgttttgggctatggtgtaggtacttacatggcttatatttgtggattaatgctacaagctgttgcaccctaaggaatagaaatgaacaaccagttaattaaaattaacgagattgaattagccaacgacaaaccatttgttttgtttggtggtatgaacgtacttgaatcacgtgatttagcaatgcgtattgctgaacattacgtagaagtcacgtcaaagctaaacattccatacgtgtttaaagcgtcttttgataaagctaatcgctcttcaattaactcataccgtggtccgggtatggaagaaggtttaaaaatctttgaagaaattaaatctacttttaacgtgccgcttatcaccgacgtacatgagccacatcaagcagcaccagttgctgaagttgttgatgtaattcagttacctgcattcctagctcgacaaactgacttagttgtagcgatggcaaaaacaggtgccatcatcaacgtgaaaaaaccacagtttttagcaccgcacgaaatgcgtcatatcattaaaaagtttaatgaagcgggcaacaacaatgttgcactgtgtgagcgtggtactagctttggttataacaaccttgtggttgatatgcttggtatggatgacatgaagcctatggcgccagtaatttttgatgcaacgcacgcactacagcgccctggaggccgagctgactctgcagatggtcgccgtgcacaagctgcagaacttgctcgcagtggcatggcattaggtattgcaggtttatttattgaagcgcatcctaatccgaatgaagcaaaatgtgacggcccatgtgctttagcactaagtaagcttgaaggttatttatcgcaaatgaaagcggttgatgacttagttaagagctttgcaccactcgataccagtgcaagcgatttataatgatataagtataagtattttagtacgaaaaaggcgaccaaggtcgcctttttttatttgtgtcgctataatcgatgcataagaaaaactaattcaaagcttggtgtttatgtctcgtcgtttacctcccttaaatgcgcttaaagccttcgaagctgctgcacgtcatctgagctttaccaaagcggctgaggagttgtatgtcacgcaagctgcggtgagtcaccagattaaaaccttagaagagcatctaggcttaaaactgtttttacgtaaaaatcgctcgttgctgttaaccgaagaagggcaaggttactttctggatattaaagagatttttacccagctgattgatgccacagagaaattgctagcacgaggtgcgaaaggttctctgacagtaagtttgacgccaagttttgcgattcaatggttagtacccagacttagtttatttaatgaattacacccagaaatcgacgtgcgaattaaagcgcaagatcaggacgaaaattcactttctgacgatgtcgatattgctatttactatggtcgtggccactggagtggggtgcaaacttataaactgcacactgaatacttagtgccgttatgtagcccattattgttaacaggcccaaaaccgcttaatcaaccgagtgatttggcgaatcataccttattgcatgatacgacccgtaaaaactggaaaacgtggatgaaaacagctggcgtacgtaatgtacaagttaaccaaggaccaatttttagtcactcgtctatggtgctgcaagctgcggtacatgggcagggtgtcgctattggtaatagcgtattagcaaagcctgatattgatgcgggtcgactcgtcattccatttaatcactcattagaaagtaaaaatgcttactatttagtgatccgcgaatcacaaacagagcttggtaaaattgtttccttcaaagactggatgctgagcttagtagagcaagaacaagagtattaacatgttacagtggtttaaaagtgcaacgggcaaggcgcgtgcacaatttatatttgcccacggagcaggggcaggtagcgactccgaatttatgcaaacaatggctaaattgattagtcagcaacatattgatgtggcgctgtttgattttcagtatatgcaaattgctaaagagacaggtaagcgcagaccacctgatcgcgcacctaagctgcttgcatattttgccgaagttttagctgaccgtgatccagagttgccgctatttattggcggcaaatcgatgggcgggcgtatggcttctatgctttgtactgagcagggtttggctaatattgctggcgttgtggcttttggttatccttttcacccaccgggtaaacctgaaaaacttcgcatagaacattttgttgatatgccatgcccatttttagtcctacaaggtgaacgcgatacgtttggtaatcaacaagagcttgctgagcttgaaatggttaacccgccagaaatcaaatggctaagagatggtgaccattcactaaaacctcgtaaaaaaagtggtattacagaacaagaaaacctacagcaggctgcggattacgctgtgcagtttatggctaatttaattggagagaaaaaatgatcaaactgtatttaatgacaggcagtatattttgtatgttctctgtaatactaggcgcatttgctgctcatggtttaaaaagtcgcgtatcagaatacgcaattggtatttttaaaaccgcttctgaatatcaaatggtgcatggtcttgcgcttatagcgattgctatcttaattaagtggggaatgaacctgacttgggctggtggtttttttattgcaggtactgtgttatttagcggtagtttgtatttactcgcattaacgggcatgaaatggcttgggcctatcaccccaattggcggcgtttgttttattattggttgggctattttgttagttcaagccgcacgatataagttttaaggggtatctatgtcgagtgtagttatttattgccgaagtggttttgaaaatgatgccgctgctgaaattacttttcaggctgccgagcaaggttttgcggggtacgtaaaaacaaaaccaaatacagggattgttgtgtacgaatgttttgatgcaagccacggcgatgagatcataaaaaaagtagattttaaaaatatggtatttgcccgccagtggtttacgggcacgttagtggataatatgccacttgaagaccgcgttagtgccattgctgatgcaaccgttgactttcctgagtgtggtgacttacgtgtagaaacacccgacaccaacgaaggtaaagagctttctaagttctgcaaaaagatttcgacaccacttaaaaagtcgcttgaaaaacgtgcaaaggttacacgtgaacttgcccagaaaaaaccagtcatgcatgtgttatttttagctaataacagcgcttatgtggggtattcgtatacatttaataattcgccattttttatgggtattccgcgattacgcatgccaagtgatgcaccgagccgctctacacttaaattagatgaagcatttaatgtattcattccacctcatgaagctgaagagcgcatgcaaccaggcatgcgtggtgttgacctaggtgcgtgcccaggaggttggacttatcagctagtacgccgtggaatgtttgttagcgctatcgataatggtccaatgaatgatgatttaatggaaacagggcaggttaaacactttagagtcgatggttttaaatatcgccctgaaaagcgcaatatcgactggttagtgtgcgacatggtagaaaagccagctaaagtaacgaatcttatgattgactgggcagtaaatgcttatgcccgcgagctgattttcaacttaaagctgccgatgaagaagcgttttgacagtgtctatgaatgcttaaaaatgattaaagaagagcttgaaaagtacggtgtaagttacgagttacaagcaaaacatttatatcatgatcgtgaagaagtgaccgttcatttaaatgtaactaaggtgccacaaagcctctacagttaacatcaatttgaaattaaaaaaggccaatcgcaattcgattggccttttttatttgaaatcagcttaacgtggttaaagttatgagcggtatttactgcggtaattttcaacccataaccgggttccaccacttacagcaaccggcataacgataaggtttacaatggggattgctgttaagagcatcactgctaaaccaaagccatatgataaggtttgcttttgttttaagtcatctttcatggcattaaaactaattttatggttatcaaaggcataatcttcgtattggatagcatacatccaacaggtgaatagcacccataaaacttgcccaatcacaggtaaaatccatagtagaataaaaaagcctatagcgcgcggcaggtaatagcaaagttttgtccattctcggcctagcatgcgtggcacatctttcattgtatcaagcagaccatcatcgttgactttttgacctgtcaggtaaagttcgactttttcactgagcaagccgttgaatggggctgcaataaagttcgtaataacggtaaagagcatgctgtaactaaataaaatgacaagcacagcaatcggccacattaaccattcaagccagctcagccattctggtagcaatgagttcatgtaagcaaagccatcagttagccagccgtacaaaaagaacagcgaactaccaaaaagtaggatattgattaataaaggaataagtacaaaacgttttaaccccttttggctaattagtttaaagccagaaaagaagtattccataccttgagtaaactgcacgagataacctcatcttatttcttcttgtttgcagtatagggttttcaatatgtttgaacagtctttttccgtaacaaagtgtttattgagcaaaattgtagcaagcaggcatactgattaatttaagaggttaaggtgagttagtttgttaacaaatcattgtgaagtgaattgtttagatattaagcaataccgcctcactggtattaatgtcttaagttagcgaaaaattctaatgtaaacttaatttatggaacattgatttttagttacaactaacctgctaggcaacccgcaaggctactcacgttaaacgttgttttttatcatttgaacgtattttcagttacatcgggatgaactaagcgataccatgactgtctgatagtacctataaaaacgaataatgaaaacaacagtagaggatcacactaatatccgatactattattaacatcattaacaaaaacgacatataaaaatgggagttttatgcagttagtcgatttaaatccagatgatccagaagtagtaaacgtgtttgctgatatagaccgactcattaactctttataccccgtagctacagctcaatcattaagtgttgaagagttggctgagcctaatgtttacgccataggtttaaaaaatgaagatggtattgttgcctgcggagcgattgtgatgcaagaaggcaacccaccatacggtgaaatccgtcgcctgtatgtgaaacctagttatcgaggtaaaggtttgtctcgccgaattatgcaaatcttattgcatcatgctggtgaacaacaaatcccgctaattcgtcttgaaacgggtcctaagcaaactgaatcaattagtttgtacgaaaatttaggctttcatcgttgtggcccatttggcaactacactgacagcccgcaaagtttatttatggaactgggacttaatcagtaattgtgagagctatttaaagctttgtttttgtgaggttaacgttattactaaacaatccttgcaggtcatgtggctttttatagctttgctgctcattgcgtgtgataaaaaacacacaatacctgaacagctacaaaacaaacaacccgaccttattattgataacgcagagttttacttaaactcatgccagtctcttagtggtgtttttaatgatgctggcaagataacttccagagtcattgttacatttcctactcgccttatgagttactgttctgaagaacgaacacaacttagctatgatggcacataccttacagtaaagctttgtcgaacagcgtttgcagcagggggttgtgggcttgaaaggtatcgctcgaaagattttcaacattggcaggaatatatcgggattacctgggtaaataatgagcagtatgaggcatggcggcagcttggttcaagctctactaaagcagatgaaataaacaaagttatcccttaagcaccaaagtttaactgtctgtttagactttaaaattattagtcgataaacgattaatttttcacatcaaaaatcactcgttacgagtaaaaattcttgttggacttgaatcactatttttcttttaatgcgcgcaattaccgcttgccaattttggcattactaaaataaagagaaagatagatgaaagaaacaacatcactagaacaagctcgcacgagttacaatgttcgtcattggagccaaggtttctttggtattaatgatcaaggtgatgtgtatgttgcgccaaaggcccatgccccagagcaaaccattgcactaatcgatatcgcacagcaattacaagacaaaggcttaagcttgcctgcgttggttcgttttccacaaattttacatcatcgagtacatagcttgtgtcaggcatttaacacagcaattgagaactatggttacccgaaagattatttgcttgtttacccaattaaagtaaatcaacaacgcgaagttgttgaagaaattgttgcaagccaagctgatattgaaaagaaacaattgggcttagaggcgggcagtaagcctgagctattaaccgtattagcaatggctgaaaaaaccagtgcggtgattgtatgtaatggctacaaagaccaagaatacattcgtttagcactgattggcgaaaagctaggccataaggtttacattgttctagagaaactatctgaactagacatggtgcttagccaagcaaaagagttaaatgtaaaaccacgtattggtattcgtgtacgtttagcatcgcaaggtaaaggtaaatggcaagcaagcggtggcgaaaaatcaaaatttggtttatcagcatcgcaagtattgagcgtggttaatcgcttaaaagcatctgaccaactcgatttgatccaacttgtacactttcacctaggttcgcaaatggcaaacatccgtgatgtgcgtttaggtgtgagcgaagctgcgcgtttttactgcgagttacgcaagttaggtgcacaaattgattgcttagatgtgggcggcggtttagcggttgattacgatggcactcgtagccagtctcataactcaatgaactacagcctaagtgaatatgctaataacatcgtatacaccattggtgacacctgtaagttatatgagcagccaatgccgcgcattatttctgagtcaggtcgtgcattaacagcgcaccatgccgtattgatttcaaatgttattggcaccgaaagctatgtaccagaagacattcaagcgccagccgctgatgcaccacttttattaaaaaacatgtggacatcatggcagcagttaagtgatgacaatgatgaccgtgcattaattgaaatctatcatgatagccagggcgatttagctgaggcacataatcagtttgcacttggtttattagacttaactgagcgagcatgggcggagcaagttaacttacgtgtatgttatgagcttaacaaacacatggataacaaaaaccgttttcatcgcccaattattgatgaattaaatgcgcgattagcagataagttttttgtgaacttttcattgttccagtcattacctgatgcatggggcattgaccaagtgtttccggtcctgcctttaagtggtttaacagaagcaccacaaaagcgtgccgtgttacttgatattacctgtgactcagacggtgctatggagcactatgtagacggtcaaggtattgaaagcacattgccagtacctgcatttagcgaagaaaaaccttatttaatgggctttttcttagtaggtgcttatcaagaaattttaggtgatatgcacaacttatttggcgacacgcacagtgcaatcataaaaatggatgaacaaggtcaggcgcaaatcaccgagattaacgaaggtgataccgttgctgacatgatgcgttacgtgcatttagatgtagaaagcttccagcagtcttatgcccagctggtagcagctaaattgccagaaactgagcagcaaagcgtattagatgagctgcaaactggcttaaacggttacacttatttagaagagttataagcaatgtcgacattgtttgaccatacagatcattcgttgtactcaaacggcatgacgtttttacgtcagccgatggtgcaaaacatcactgcaatcgatgccgatgtggtggtgctaggtttaccatttgacttagcgacctcaggtcgcccaggtgcacgtttaggccctgatgcaattcgtcgtgcttcagtgcaccttgcatgggaagaaaccaagtatccttggacgttcccattatttgagcggttaaaattagctgatgcaggcgattttacttacccagtaggtgacccagaatattttaccgcgcagttagaattagcggccgagcaaattcttcgtcaaggtaaaacattattgggcctaggtggcgatcactttgtgactttgccactactacgtgctcatgctaaacagcacggtaaaatggcattagttcactttgatgcccacaccgatacttacagcaatggttcacgttatgatcacggtactatgttttatcatgcaccgatggaaggtctcatagatgttgatcacagcattcaaatcggtattcgtactgactttgatcagaataagcatgagtttgcagtgattgatgcaatggctgctaatgatttgccagcgcaagatattgcagagcaaattaaagcgcgcgtcggtgacttacctgtgtatctcacctttgatattgactgccttgatccagcattcgcgccgggtactggcacaccagtgtgtggtggcttaactagcgataaagtacttaaggtacttcgtgcattgaagggcattaatatggtcggtatggatgtggttgaagtatcaccatcttatgaccaaagtgagttaacggcgattgccgcagcgaccattgccaatgagttattacacttatgggctttgaagcataaatactaaatgagagagacaaagagcgccattaggcgctcttttttttgattaacaagatgaagcaattatgcgcttcttacatcaacttttaacttaagtttttgcccaggttgaatgtacttttgcccagctaatgagttccatttaataatatcttctacagacacattaaacttggcagcaatgcgcgctaatgaatcaccacgacggactttataagtaatggtgcgctctttgatttgagtagcagccagttgtgacttttcttctttatatacagttagcttttgaccaacacgtaatacagcatcttttttaagtttattccatgttgcaagctctgcaatggtcacatcgtactcacggctaatatcccacagcgtatcgccactggcgactttatggcttagctttttacgtgttgctttatttgcagccatacgcactgattttggtaaatgctggctatttatctcaccatcactcagtggtacaagtaattgctgaccaacacgaatggtattcgatgagagtttattcagtgttttaatagcattcgtactagtagaaaacttcttcgcaatcacagataaactgtcaccgcgcgcaaccacgtattgttgccaacgtagacggtctttttgctctgtttttgctagttttgcagagaactcttcaactttatcagacggtaataataaaaagtgcggtccattagggtcggtcgcccagcgattaaaacctgggtttaaacgataaagttcagttaaactaatacctgccatatcagctgcaagcgctaagtcaatttggctacctacattcaccgcctcaactacttgagcattaataattggttgccacttaacaccaaactcgtcactgcgtttaactagatcagacagtgctaacagtttaggtacatacgaggtcgtttcttttggtaaatccaaagaccaaaagtctgttggtaaatgttttttacgattctttttaatagctcgtagcaaacggccttcacctgagttataggctgcgatagcatttaaccaatcgccttctaaggttttgtgaagatatgacaaataatcaagtgctgcacgggtcgactgtacaatgtcacgacgaccgtcgtaccaccagttttgttttaaatcaaaacgctcaccagtttgtggcatgaattgccagatgcccgaggcactgcgatgtgaataaccaaatgggtcaaaagcactttctacaatcggtaaaagcgcaatttcaattggcatttgacgcttctcgacttcttctacaataaagtacaggtaaggctctgcacgcttagagattcggtctaaatatgcctgatgacgtgcatagtagttacgctcagcaaccactgggcggttttgtggcacatcaatcgaaagttggtaacgaatacgctcccatacatcatcaaataccggtggtggctcatcaagatctgcgacctgttgatactgtgcgttaatcattagtgcatcattaacgtcactagggcttgcgccattgagctgttgctcaacatcattattagctgtggtatctgagttagaagctgttaactgacaaccacttagtaccagcgcaagtgttataactaaaggagacttatacatatatacctatataatcaggtaaaaaaactcggcgaatattacctgctataagcacatattgccactttatgaccagtatatgtcagctcattattgcaaggtgttgatctaaatatagaaaaaatgtaatcggtagagttacacttttaaaaattatctttccaggctctgagacccgcaaagcgttgccaaggttcagctagatcaagattttctttcagctcgcttggaagctcatcagttatgtgtggaaaatgacaacggataaaggggtttatttgcctctcaacgcttaattgagtcggtaagctaattttgccgctttctcgcagcgcatctactttatcactgtagttgagaaggtattcgttatttggttcaacagcttttgcaaaggccaagttggcctgcgtgtattcatgagtgcagtagattttacactcatcaggcagagctcttaatttacataaagagtgccacatttgttcagcactgccttcaaataatcgtccgcagccagcactaaataaggtatcgccagtaaaacttaactcgtcattaatgtaacaaacatgatcgagagtatgccctggtgtcgcaagcacagtaaaagtgtaatcgtacaccgtcaccttatccgcttcacaaacgccatggctaatgcctttgaaagggctgtgtcttggtccgtacaccgggatatcacgaaatgtttttaccaaggctgcaacgccatcggtgtgatcatagtgatgatgggtaattaaaatccctgcgagtgataagttattttcgcttaggtaatttagaacgggctctgcctgtcctgggtcgaccacccacgctgtttgttcagcttcattgctgatgcaccaaatgtagttatcagaaaaggctttaattgctttaacttgcaccatgtttaattgctctataaagtgacagttaacacacagtataacgagctcagaaaatgaaaccagcccttagttttcaagaaggtcctaagccatactcttggcagcagttccctcatggtgactatttacgtgctgaaattgaacgtaagctaacaccatggctgccgcgcatgtttggatatcacatgctcaaactcggtaatttaagtggtgagctagcaaccagtgaaagtcctattaagcatcaagtttgcgtagcagagcagggcttatttaccggtgttattgctgatgtagacgagttaccgttttatgagcacagtgttgatgcctgcatattatcgcactgtttagaatatcattctgatccgcaccatatcttacgtgaagcgcatcgtactttgatccccggtggttacatcgtgatcacaggctttaacccgtttagtttgtgtggattggcgcagttattaccttttagccgccaaaagctaccgtggacagggcggttttttacgccatcacgagtaaaagattggttgaatttattaggctttgaaataatctctgatgagcgttttatccattcatcgcttgcaagaggtaatcgcttatcgcgctttgctgcgtggcgcagctttggccagcaatatttaaagccaatgggcagtgtgtatatgctggtggctagaaagcgtgtggccccgctgacaccaattaaacctaaatggcatgcaaggccgcaattttcgccagtgaaaggagcaggtcttagacaaacatcaaagcagcactgtgagcgggatagctagataatgctgttgtgtgtctgttttacttggatactgacctgcacgaatatttaattgaatagcaggatgcagtagttttggcactgccaaggttgcatcgcggttttcacgtgttgcaataaaatcttgtttatctccttttaagtgaatgttttgctcacgctgctctttaaccgtggttttgtttgctaaaggtcgaccatcaggttggtagtcatggcacatccaaagcactgtatcgtcaggaaacgctaaaatttgttgtagtgaatcatataattcgcctgcgctgccgccgggaaagtcacagcgtgctgtgccactgtctggcataaagaaagtgtcaccgacaaatacattgccatcaatgtgatagcacacactgtcaggagtgtggccaggcgtggcaatcacatcaaccgtgtaattacctaacttaaattgcgttttattagcaaataaagcatcaaaaggctcgccattacacggcatatccagattgtaaagttggctaaagtgcttttgtacttgtgtgatcccttcgccagtgccgagcttgcaaggatgtgtggcttgtaattgctgctttatataacttgccgcagtgatatggtcagcatgggcgtgggtttcaagtagccattgtaatgtcagctgctcagtttttatgaagctgatgatctcattggctgtggtaaaacttaactctccacttggcatatcaaaatcagctggcgcatcaatcagcaagcaatttttagtgctttcacaactgactaaataacagagagtggcgctttgttgatgaaaaaaagagtgaatgcgcagagccataatgagtcctttatatttctttatagccaaatcttataacatataacaaaaatataaaacggcctgcgctatgtttcttttaagttaattttaattaccgtcgtaacctgtgtcttcaagtaattgatcgctgccagcggcttcgcgggctagatcgtcaacaatttcattatatttgttgccgctatggccttttacccagcgccattctacttcgtgttgctggcatgctgcatcgagtcgtttccataaatcgacattcttaactggttttttagctgcagttttccagccgcgttttttccaattttcgacccatgactcaatgccttgtttcacatattgactatcggtagtaagaatgacgtgacaagagcgggtgagggtttctagtgcaacgatagctgcgagcatttccatccgattattggttgttagggtatagccttgactcaattgcttttcgtggccgttgtatcgcatcacgatgccataccctccaggccctggatttcctaaacatgatccatcggtgtaaatctctacggttttctgcactgttttaccttgatattgtgtacaataaagtgaatatagaaagataccagagtcaggcttaagacgatatggcacatagacaaatagttttagatacagaaaccacgggtattgacccaaagcaaggccaccgcatcattgaaatcggttgtgttgaacttgtgaatcgccgtcttactggcaacaactttcatgtgtatatcaatccacaacgtgaaatagaagaagaagcgatagacgtacacggtatcaccaatgaatttttgcgtgataaacctttgtaccaccaaattgcccatgagtttttagagtatattcgtggcgcagagcttgttattcataacgctgcgttcgatatcggccacatggacaacgagtttgcattgttaaatcaaggttttccgaatactgccgatgtatgtagtgtacttgataccttgaaaatggcgcgtgacttgcatccaggtcaaaagaataaccttgatgcgctttgtcgccgctatgatattgataactcaaagcgtactttacacggcgcattactggattccgagattctagcagatgtttacttggcaatgaccggtggacaagtaaagctgaacctcaatcaaaataaagatgaaggctcaacacatcaaacgggtggtattcgtcgtcttagtgccgacagagcaccccttgtggtattaagagcaaccgaacaagagcaagctgcccatgaggaacgtttagatttagtggcaaagggtggtcaatgtttatggcgtgcagaataaggtaatgaaatgagaaaacagctactagcaggaatactgtgcttaatgccttgtatgggatttgcaacagcacaagataagataacgccattagctcgggatggggttaaaaatgaaattcctctgttagaaaaccgttttcgcatcgatcataaaatcgataaagtaaccttactgttctttcgtaaccgcggtgcacctgccgttgtattggttcgtcctgatgggactaagtattacgccacagactcagtgaaaaatcatgatcttgattggtatgatgagctcagttatgacttagtcactattactaatcctatgccgggcccatggcaggttgttggcaaaatcttgccaggaagccgtattatggtgatgggagaaattgaattagatgtagatcctttaccgccgatgctatttcgcggagagacagtgaaactgactggtcgcgtattaaatgatggagaacccatcgaagtggggcagtttcgtgatgtgattagtttgaatgtcgattttgtcagtactaataatagtgattactcaaactttggtgccggtacgcaaagtgtcactgagtttagagatgatggccgtggttttgatgagcgcccgcttgatggcgtatttactggcgaatttaaactgacgtttcctgcaggtgagtggcaaccagagctatatatagaaacgcctatattaaagcgtaccgtggtgcaaaagccaattgtggtgcatgagccgccttttgattatgaagtagcacttgctgagcaagatgaagatgaccacattttaacgatcaccttaaatcctgaaatcgtcaaacctgaaaccgtgctcattcaggggaaaatctattatccgaataatgaagagcaaatgttctcaattgatgcggataaatcacaaatgcgcgaacttgcaattaaaaattatgactggggtagatacagtgttgagctatctgtatttggtagcaatataaatgaccgtgaatttatggctactttaccaacttataaatttgaaattgagcgacccattgaagctgtaccagaaattgttcgccctgaaatcgatttagaagcccaagctgagcagcaacgaattattgaagaggaacaaaaagcgtccactacactaatggtgatactcattgttgttggaaatttaatcgttctactgttagggtggctagcgattcgaatttttgtgcagaaaaaaccacttaaatttaaagtttctttgccatttttaaagaaaaaaaataaaactgaaaatgatgagcaagcagcgaaagaaaatgaagtcggcaaaaatggctcaaaaaatgacaaatcaggtgaaattttaaacctttcgatgtcagatgactaaaaaacctgtaaaaatacaaaaaaccccttgacgaaccagagggtgattcgtattattcacgccgctgtcaggggagactcagtcagcaacgaaaatgtggagtggtagttcagttggttagaataccggcctgtcacgccgggggtcgcgggttcgagtcccgtccactccgccaattttcgacaatttgtaagtatgcgctggagtggtagttcagttggttagaataccggcctgtcacgccgggggtcgcgggttcgagtcccgtccactccgccaattacttacacaacgtttggttgtaaaacatttttcctttgcggagtggtagttcagttggttagaataccggcctgtcacgccgggggtcgcgggttcgagtcccgtccactccgccaataggaaaaaataaatagcattaaatactgcggagtggtagttcagttggttagaataccggcctgtcacgccgggggtcgcgggttcgagtcccgtccactccgccactatttaaacgctattttattacaaaatttgtatcgcggagtggtagttcagttggttagaataccggcctgtcacgccgggggtcgcgggttcgagtcccgtccactccgccaacaaattaagtaataacaatgatatctctgcggagtggtagttcagttggttagaataccggcctgtcacgccgggggtcgcgggttcgagtcccgtccactccgccatttgatatcataaacaaattaagtgcattaccccatgcacataccactgcggagtggtagttcagttggttagaataccggcctgtcacgccgggggtcgcgggttcgagtcccgtccactccgccatttgttttcctcaaacaaatgattaaataagtctttacattacactttactatttacttatactgacaacgtatctcgtatctcgtatctcgtatctcgtatctcgtatctcgtatctcgtatctcgtatctcgtatctcgtatctcgtatctttcatcctatcttgctaatattcttcattattcctatttattcagctttttatatctgcatgaatagcaaagaatggcggctccacaacaaaaaggaaatgcgttatgagtacattcggaacacagctaaaacactatcgcagtgagctaaaactaagccaaccagaatttgcagagcaagttggaatagagcaaagttacctttcaaaacttgagaacgataaatcagtgccttcgaatgacacatttcgttcaatattaacggcgctcaatctaacaatttgcgactttatggagccattaaaacattctgtagataaagctcggttgattaatgtgcctgacattgaagcttggtataagcaacaaagtaataagcaattcattaagcagcgttcactcgtctatattgccatactgttaagtgcgctaggctgtgccatgttttatttagggcatcaagaaaagctattcaatacaaaattctatgagtacaaatcatatggtgtggtgaaagataatgaaccagatggcatttttcatgattggcgtatgctcgtagaacaaagcagcgagaaaatagatgctaaacgtcgtgaaatgattagcaggcatgattttaaatttattatctcagcggactataaaggtttttcgtttgtagaatctggcgagcaaggcaggcgtttatataaccttacttcaaaaacacctgttatcaagccccataaaggccatgtgtggcttgagtttatcggtatcttattgtttgtagttggtgcaggtctcataacatttgagagtaaactgacaagagtgcattaatgagttgtagaacctgacgcgtgttagcttgcgtcaggatcgcgaggaattaaatgcgcaaactgttgctggtggatttgttcgtataaggtcgctgcatagctttgcgcgtcttgtaatcggcgcgtactgatgtgttttcgaaggtcgttaagtgctgcggttgcaggctcataaccctgactacttgccagacttagccacaccgcgccatgaaatacactgtgcggtacaccttgccctttgatgaaaaacagccccatataaaattgtgccctatgattacccgccatagcagctaaacgcatccatttggcagcaaggggaggctgttcattttttaaataatacaaagctttgtttagtacgttttcaacagattgagtacttttatctggcgccgaccctttatcgggttgggttataaaggcaagtacattatcaagctgttgctctaaatctaagcctactggcgaattatcagacatagtttagttattttcttgaaataaaagaccttattagtttagaacattgcaaggtaaaatgtcctcttattgagataaaatatgataaaattagccaattaatctcaacttaaagttaaacatgttcgaaagacttttcaaaatcactgaaaataacacgtctgtgcgccgcgagactattgctggcatcacaacattcattaccatggtttacattgtatttgttaaccctgcaatgcttgcagaagcgggaatggatcaaggtgccgcattcgtagcaacttgtattgctgctgcaattggctgttttatcatgggcttatgggcaaactatccattagcactggcaccgggtatgggcttaaacgcgttctttacctatggtgtagtgcttggtatgggctacacttggcaagccgcacttggtgcagtatttatgtctggctgtatatttttgtgtttaagcctatttaaggtgcgagagtggatcattgatgccattcctctggtgttaaagcgtgccattgccacaggtattggtgctttcttagcgcttattgcactaaaaaatgcaggtattattgtagcaagtcctgcaaccttagtgcagttaggcgacatcacagctcctggtcctttactggctatctttagcttttttgttattgcggctcttctatatcgcgacatgaaaagcggcgtgctaattagcattttattggttacggctatcgcccttggcttagaccttgtggagtatcaaggggttatttcaatgccaccttcaattgcgccaacctttatgcaactggattttgcagcagcattcgaaatctcaatgctaacagtggtttttgctttcttatttgttgatttgtttgacacttcaggcaccttggttgctgtaacgcaaaaggcaggtcttgctgatgagcaaggtaaaatgccacgcctaggtcgtgcgttaagtgccgacagcacagcaacgattgcaggctcaatgcttggtacttcaacgacaacgtcatacattgaatctgtagcgggtgtgtctgtaggtggtcgtacaggtcttacagctgttgttgtgggtatttgtttcttgttaatgatgttctttgcaccactagccgggatgatcccagcgtatgcaacggcaggtgcgattttgtatgttgctgttttaatgatgcaaaacttaaagctggtaaattgggatgatatgacagatgccattccagtgagcgtggtattattaatgacgccgttaactttctctattgcgcacggtatcgcactgggttttatttcgtatactgcggtgaagttggtatgtggtaaaaaagatgaaatcagtattagtgtgtgggtgttaacagcattgtttattgttaagttcgcgtttttatcttaaacaccaactaaataaagtaagcacaaagaaaaagtggtttaccactttttctttggtgcgaataacacgtctaagtcgtcttgctcttgctctgcttttttcttaagtgacgttgcattagatgctttcagttcagagcttatcgcttctaagtaattctcaacttcttgttttttactattaacatattcatcgctataactaacagatgatagtgttgcgagtgctttttcaaagtattgtctcgcagagccaaccatattggcagagcgagcagacatacctcgcttaatttggctttcgacattaatacgtaattgaagtttttctaaacgtttatcttcggcaacaaaaacttggctatcgactttgcctttaccatgttcagagcgaagtaaggtacgcagtttctttataccctggataagtgaaataagttgtttgtcgttatctggtaatactaacgcttctgtgttgttgacttcgagaggagcggttaagcgttcttttgattcttttaaacgattttttaattctcttgagtttggcgaaagttgcaccatgcttgctagtgcatcataaatacgtcgttgaataatgcgtaaggtgttttcagacatagggatgttcgtactgttaagaagtacatcttctgcctcttcgataatttttttttgttttgttagttctttgcggcgctcagcttcttgtttttctttgtgttgctgcacagcacttacccacagtgcgattacgattaatgcaacaatgagcatgatgatgatagaaacaatcattactaaatctcagttttaactatctaatttttttatcttacattaaaaagattagatctggatagttttgcggttacttatctagaataaacttctgatgtttactactttttaatgagtatagcgttaaagcagcatctttattgaatattttgcgagtaaacacggctaccgagcagtaatttattgtgttagccttagaaacaatcgatataaaagtatagcgcgatgaaatatcacttggcattgcgctttgcagcctttataaataaacaataacaacgtttacaatgcagccatgaaattacaacaactcagatatatagtcgaagtccaaaatcataaactaaatgtttcagcgacagcagaaagtttatttacttctcaaccagggatctcaaagcaggtacgtatgcttgaagatgagctcggcgtacaaatttttggtcgtagtggtaaacaccttacgcacgtaaccagtgcgggtaacgaaattattaatatttcacgcgagatactatcaaaagttgagggtattaaagcggttgccaatgaacatactttaccggatcaaggtaagctaaacattgctacaacacatacccaagcacgttatgcattacctaatgttattcagggctttatgaaaaaataccctgcagtatcgttgcacatgcatcaaggtacgccgcagcaaatttcggacgccgcagcgcgcggtgacgcagactttgccattgcaacagaggctttacatttatactctgatctagtgatgcttccatgttatcactggaatcgcagtatcgttgttgcaaagacacatccactggcgcaaaaggctgataacttaacagttgcagatgttgctaaatatccccttataacttatgtgtttggttttacaggtcgatctgaattagataaagcttttaatgctcatgggcttgagccgcatattgtatttactgcaacggacgcggatgtaatcaaaacctatgtgcgtttaggacttggagttggggttgtagcatcaatggccattgaccaagtaactgataatgatttggtgtgtattgatgctagtcacttatttgaagcaagtactactaagattggttttagaaaaggcagctttttacgcagctacatgtatgattttattgagcgttttgcaccacacttaactaaagagttagttgagcgagcaagtttattacgtaaccaagaagatgttgataagctcttcgaaaatattgagttaccagtaaaatagagataaaaaagccgctttaaagcggcttttttatgtgctgaagatgtgctttaaattaacactcgatgatattaaccgccaagccaccgcgagcggtttctttgtatttggttttcatatcattacctgtgtcgagcatggttttaattaccttatcaagggtcactttttgctcgccagagccacgcattgcaaggcgtgacgcattgattgcttttatagcacccatcgcattacgttcaatacacggtacttgcacaaggccaccaacagggtcacaggtaagacctagattgtgctccatgccgatttcagcagcgttctcaacctgcacaacattaccacccattatttcagttagtgcgcccgctgccattgagcaagcaacacccacttcgccttggcaacctacttcagcacccgaaattgaggcattctttttatacaaaataccaattgccgcagctgttaataaataacgggtggcaatatctcggtctacttctttaatgaaagtgtgataatacatcaataccgctggtaaaatacctgcagcaccattggttggtgcggtaacaacacggccgccagctgcattttcttcgttcacagcaagggcaaataaatcaacccaatccatagcgcgaagcgggtcgttgttaacctcaatatttaatttaaggtgtaagctaggtgcgcgacgttttacttttaagccgcccggtaaaatcccttctgtgcgcatgccacgttcaatacaggctttcatgacttgccaaatattaaacaactcatctttgatgtctttttcattacgaagggttttttcgttatgcatcataagcgttgatacactaaaccctgattcgcgacacagctctaacaactctttagctgtattgaatgggtaaggtgctgggttttcttcacggatttcgagcgctttttgtttttcgttctcgaactcttcatcacttacgataaagccaccaccgattgagtaatacaccttactaaaaagtttttcgccattttggctcgcaatgatttccatcgcatttgaatgcttaggtaatgttttacgacgatggaatacaatcgcaccttgctttgggaaattagctttatggctttggtttaagtaaataacctgttctttttcgattttcgcgagaatatcatcgactaaatcagcatcaatggtttctggatcataaccggcaaggcctaagatcacggctttacctgagccatggccaatgcccgtttggcctaatgaaccaaacagctctactttaatatcggtgacgtttgtaagtatgtttttttcttctaattcgtttacaaataaacgcgaagcgcgcattgggccaactgtgtgagatgacgatgggccaataccaatactaaacatatcgaatgcactgatcataatttgctactcattttcctattaaacgctatacctaaaatgtagtcccctttacatactttgctcagtaacttaggggaaggtatatctgtctttgaacggtgccacatgataacgtttctatgtggctgtgtaaccctaaaagcaggataattaaactggtagggcgagctgcttgataaagttgttaattatgctcgcggttgctccccaaagtaggccatgcggggtcatcaagccctgtaatatgatggttttgccattgcgctcaaaaggaagaggttgccaattttgctggttgctcaaatgtgatatcggtagcaaaaaactggcggccacttcattaggatctgcttgccatgtagtgcctttactaagtacacaaacaaatggttcaatagtgaaaccagttagagtcgcatactggtgtaatttaccgtgaacagtcacttgatgtgtcgcaatgttgagctcttcattaagctctcgaagggcagtgtgcattaaagtgtcatcttgctcctcatacttaccacccggtaagcaaatttcccccgggtgatgaagtaaataacttggtcgtttgcacagcaataaatgcgcttcgtcattaacatcaagcagagggatcattacggcactggcacgcttttcggcattaaagcgaatggtggtagggcgctctgtggtttgacttaaactaaagcgggcaattatttgctgactattcaaggcttttacttcaacttttactttaataaaggcagtattttatttactttatcgtaagtttcttggtactccaagtcgacctttgaatcagccactatgccaccgccagcccaacaatagatagcaccttgatggcacactaaagtacgaattgtgatactggtatccatattgccacaggcacttaaatagccaattgagccgcaatacacactacggcgatgtggttcgagctcttctataatttccatagcgcgaattttcggtgctccggtaattgagccacccgggaaagcggcatgaatttggtcaacggcatctttaccctcggctaattctgcgcgcactgtacttactaaatgatgtaccgcaggaaagctttcaatggcaaatagcgatggcacagtcacgctgccaggtcgggcaactttgcctaaatcgttgcgcaatagatcaacaatcatgacattttctgcacggtctttttcagattgttgtaagcgagttgcttgcgcttggtcttgttcagagtcagccaaacgtggcagggttcctttaatcggcttggtttcaatttggccttgatttatcgagataaagcgctcaggtgaaatagataaaatagcgccatctgggtgattgatatagcttgaaaacggtgctttattcgcttctcgaagttgtttataggcctgccatgttgaacctgaaaattcagctttaaaacgctgtgcaaggttgatctggtagcagtcaccactttttaaataagcttgaattttctcaaacttttcgctgtagcttgctttgctcatgtttgactgccagtcgctttgcagcgcaaactctgcacttgctggtgtttcgttaagatgctgctggtatagcgctaagcgattgtgacttggctgacaaacgtaaaaccagctctgttgttgcttatcaaaaataagggcatcaggataaaggccaacagccatttgcggcatgttaatgtcgttttcggcatgatttggcatagtttcaatcacacggcctaagtcataaccaaaatagccaagccaaccacctgtaaaaggcagattgttagggtttgctgtgtgattaaattcctgaagacccgttttcattaaactaaaacaatcactcgattgttgcttaccgtcgataaagcatgtattttcgcgcacctctaattgctttagcggcgcaatggcaatgatatcaaagcgactatttacatgttcactgttagctgaatcaagcaacacggcatggggcaaatgagcaaaatgagtaaatagcgcgatgcaatcaccgcttaaatctaatttaatgcacaaattttcatcgtttatcatctacattgccctgaataactagcccgaaacgggcgaggagggtatcataagttaaatttgattggcagcgttatgatttcctttatagtgatgccatgactaacccgtagagtaaatcttcgtcaccggtttactcaggatcacgtacagcgctacgcgataaaaacttaaggaacccgtaatgagtacaattcgtcagcaagacttcattgatagcattgaagatgcattgcaatacatttctttttatcaccctctcgatttcgtacaagccttagaaaaagcttacaacaaagagcaaagcaaagcggcaaaagatgccattgcgcaaattttaattaactctcgtatgtctgctgaaggtaaacgtccactgtgccaagataccggtatcattacctgttttgtaaaagtaggtatggatgttaagtgggataaaacagacatgactgtacagcaaatggttgatgaaggtacacgtcgcgcatacttaaacccagataacccgttacgtgcatcaattgttgcagaccctgctggtacgcgtaaaaacaccaaagacaacacaccttcagttgttcatatcgacttagtgccaggcgctgaagttgaagtaatggtggcagctaaaggtggcggctcagaaaataaaacgaaaatggttatgcttaacccatctgatgatgtggctgcatgggttgaaaaaactttaccaacgatgggggcgggctggtgtccacctggcatgctaggtataggtattggtggtactgcagaaaaagccgcggtacttgctaaagaatcattaatggatccggttgatattcatgagctgattgagcgtggcgcagaaacaactgaagaaaaaatgcgtatcgatatcttcgaacgtgcaaacaaattaggtattggcgcacaaggtctgggtggtttaacaacagttgttgacgtgaaaatcaaaactgcaccgactcatgcagcatcaaaaccagtagtaatgatcccgaactgtgcagcaactcgtcacgttcacttcacgttagatggttcaggcccagctgatcttaaagcgcctaaacttgaagattggccagaagttacgtttgaagtaggtgaaggtacacgtcgtgttgatttaaacacactgactaaagaagacacgcaagaatggaagatgggtgaaacggttcttctgtctggtactattttaacgggtcgtgacgcagcacataaacgtttacaagatatgatccaatcaggtgaaggtttacctgaaggcgttgattttgataacaagtttatctactacgttggccctgttgatgcagtaggtgatgaagcggtaggtcctgcaggccctacaactgcgacacgtatggataaattcactgatatgatgttagaaaacactggcatcatcggtatgattggtaaagcagagcgtggtcctgcaacagttgaatcaatcaagaacaataagtctatttacttaatggcggttggtggtgcagcttaccttgtatctaaagcaatcaaaaaagcacgtgtagtggcttttgaagatttaggtatggaagcaatctacgagtttgaagtagaagatatgccagtaacggttgctgttgatagcgaaggtgcgaatgcgcatacacaaggccctgctatttggaaagcaaaaatcgaagaacttgatggtaaattaaaataatcatcctgtaagtcttttaataaaaaacggcgcatctgcgccgttttttttcagctctgaccagtctcggctattttctctgcatgcccttaaaaagcagatactacttggctttatcggcacattttccttgtcactttttctttacgctatactttacctttacgttcacgtaataaagttggtgatgttaatattttgttttgaattaacaatgctcaattcaaactttggttggtatattttttctttaataagttgttttttgagttgttatttctgtcattgaactttgcttagttttatcatctcatatagtggtaagcgagcatatgaagtgataaagtctcggcaatttcagcgctcacaccccttagggtaagaaaatttcggagtatttaactgtggctgtatttaataaagtcgactttgataaccacgagcaagtggtgttttgttcagataaagaatcaggcctaaaagctattatcgcggttcacaataccaagttaggtccagctgttggtggttgcagaatgtgggattacacaacagatgaagatgctgtaacagatgcacttcgtttatcaaaaggtatgacgtataaaaatgctgtagcacgtttaccatttggtggcggtaagtcagtgatcatcggtaatgctaaagaaattaaatcagagcaacttttccgtgcatttggtcgccaactagagcgtttaagcggtagctactattcagctgaagatgtaaacatcacctgtgatgatgtggctatcatgaataaagaaactaactatgtattaggccttgaaggtaaaagtggcaacccatcaccatttacggcatacggtacattcttaggtattaaagctgctttacagcatcaacgtggtcatcaagacctcgctggcatcaaagtagccgtgcaaggtttaggtgccgtggcatatggcctttgtaagcacctacatgaagcgggcgcaacattatttgtaacagatatcaacgagcaagctgttgagcgtgttgtaaatgacttcaatgcaacggctgttggtattgatgaaatctacgacttagatgttgatgtttatgcaccgtgtgcgctaggcgcaacggtaaacgataataccatccctcgcttaaaagcaacgattattgctggttgtgcgaataaccaattagcagagtctcgtcacggtgagatcatccgtgaaaaaggtatcttatacgcgccagattacgtaattaacgcaggtggtatcattaacgtttactacgaaactgcgccagaaggttatagtgcagaagcttcaactaagcacgttgaaggtatttacgataccttaactgaaatctttgctcgctcagagaaagaacaaaaatcaacacatttaattgccgatgaactagcattagaaatcatcgaaaacggtttataattaattaaattagttgttcaaaaaggtgcgcaggtcgcaccttttttgtgctcgtaatttgtcgcaactaagtgacgaagccattttaactcgttaaactcgatttttaatcttcgagggtctcttatggatacagcactttgtgaaatcacaccgattgatttagattcttggcctcgaaagcaacattttgcttttttcagtgagttttctttaccttattttaatgtctgtgtttcacttgatatggctgcgctttatgaaaaatgtaaaaaatcgccgtactcattttttcatacatatgtataccttactttggaagcgtgtcatgactacgccccaatgcggcaacgtattatagattctctaccggtacaactgtcatcggtacgagggagtgtggttgagcttgctgatgatgatacgttccgatttagttattttgaaaaacaggcgtcgattgaagcgttttctaaacatgctattgaagtgggaaaaaacagtaaagtacaagcttttttctctgatgcatttgctgcaacagaagggcagccagacctaattcatatctcagtgctaccatggttaaactttactggtttttcgcatgcggtaagtgaaggtcacggacttggtattcctaagtttgtattcggccagtttgattcaaaaactggaaaaatgcctctgtcgattgacgttcatcatgccttgatggatggacttcatgtagcgcagtttttaaaggtactacaagaaaaaattacaaatttttgtaattgattgttgctaaatgtgattaaagtaagtaaaaattgcaactaatgtagtattttagcaattcgcttaattaagtaagttggttccattcagggttttgcttaaccctgaacctataaaactacatcactgaaaagaatgataataaatatcagggtcttagtttatggtgcgggtagttagctgtattttacttttcttgtgtttcaatgcttttgcagattctgcacgcctctctctcagtgattattttaccgagacttggagtacaccggcaggccttccacataacagcataaattcagttacacaaacaaatgacggttatatttggatagcaacttgggaagggctcgctcgtttcaatggtcgtgaatttaaactttttacccgtacagaaattcccggcttacctgactcaggcctacgcagcctgattccgatggataatggtgatttatatatagtgggtgcccgtggcggtattgcgcttcgctcacaaggtggatggcgcgctttagcaacatcgtcagctatgataaatcatgcacttataactgaacaaggtgagatttggcttgccctcgaaggagaggggattgcttatcgggccacagagcatgcacctgaacaaaaactacttgataaactgagtgtttatcgcttgttacaagaccaagagggcgttatttgggcggcaaccagtgatggcttgtatcaaattatagataacaaggttagtaaggttggccgagattcagggttgccggacgcctccgtatttactttactactaacgaattcgggtaccttaattgtaggcaccgaaaaaggtgtatggaaaaagcaacaatacaagttcacttctgttgaccccgtccttaataaagaatctatctctagcttacttgaagatgcacatggtgatttatggtttggtaccattaataaaggggtgtttaggttaagtgaattgggtttagaaaatttagccgctgacgatggtttaccaaataatcgcatcttatcgctaatgcaagatcgtgaaaaaagcatttgggtcggaactaacgcgggcttatttcgattaagagaagccccttttacaaattggaacaagagtagaggtctggcatcaaattatgttcgtacagtgctctctcactcagatggcagcttgtgggtgggcagtagtaacggcttaaatcgtattgagaatggtgagttaacaacgcttgaacaagttaacgacaaagaccctttatcagtgttaagccttaccgaagataaacagggaggtgtttggcttggtacttatactgcgggtttaatgaaagttgcagataacaaaatttatcccgttaaaaatcgaagtaatggtcttattagtaacgaagttcgcgcggtgctatttgattcgtctgataacttgtgggttgggactgcaggtgggttaactaaaatagatacctcagggcaaacatattcatatacaacagtcgatggtttagctggcgactttatcatggcccttgccgaagatgcttatggcaagatctggattggcacaggcgttggcgtatctatcttagattcagcttctggacaaatcagctcattaaaatttcctgatcagtttagcactgagtatgcattcggcttttatttggatggtgataaaatgtggctcgccacagaccgagggctagttcgctacaacctcagcacagatcaaatgagtttgtttggccgagagcaaggtttacccgttgataaactgttccaagtgattgaacaaggtgattcactttggcttaccagtaatcgcggtgtcattcaggttaacaaagcacaactcaatacgttattagataacccagctaaaccaatggacgtttccatgcagctttatgacgaaggcgatggcatgctaagtgcgcaagcgaatggtggctcaaaccctgctgcggtaatacattctgatggtcaaatatgggttgcgaccgctaagggcgttgctattgcagcaccagagcgcttaaaagaggccagtaaacgccgtttgtcgactgtaatagaaagttttgaagtagatggtaaatcaatgcctttaacttctggtactgattttattagtttgccggcaggtgtctcacgtgtgtcttttaattacgcagggctaagttttattatgcctgctcggcttaactatcaaactcaattaagtgggtacaatcaacaatgggtagaccgggggcgtctgaccattaccgagtacacaaatttaccgccaggtgaatatacctttaaagtgcgcgcaggctacccaaatagtgattggcaaaataatgagcaagtattgcattttaaaattgctccttatttttggcaaaaaaccagctttaagttatttatcttaattgccgttcttttcaccgcgtatgtcatttataaatatcgactatatcactacaagcgaattgaaatcgaattaacggaaaaagttgaacagcaaatgcatgaactaaaaacacaagctgatgcatttgcccacttagcaaaccatgaccaattaacacaattgccgaatagacgcgcctttgatagttggttagcaaataactttaaccagtttcaagatgaggataaagcgctcagtattgcgattatggatattgatcactttaaacagattaatgatgatttctctcatttaatcggtgataaggtgatttgtgaaatcgcacgattattacaaatgagttttccagatgaaggctatgctgcacgatggggaggtgaagagtttaccttactattcccgcacaaaaatgctgaacaagcagcactgttgtgtgaaaacatacgtttacagatagctgactatgactttgctgatatcgcaacaggactatgtgttacggtgagctttggtgttgcagataattcaaaagtcactgactatgatcgattactatctaatgcagacaatgctttatacagtgctaaaaatagcggccgcaacagggttttcatgcataataagggttgtatgacaccaagttaaggtttttgaaaataaaaagtgtgcaaacaattgatcttttttggtttgcacacattaaagtaacaagactgttttttaggcgttagtaatgctaaacctgttgttgttagtttttttaattatatttattgtctgttactggcgctgggatgacatccgtaaccacttttggcagaaaaaataccttaattactccctcaatgctcagcaaaaaaaactgctattaaactatatgcccatctaccaaaagatgacggatgcagatcgcgaaaagctggagcgtcacattgtctggtttttaaatgaaaagcactttattggctgtgatggccttaaacttaatgatgcaatgaagctgattgtagcggccgatgcctgtgttttagtgcttaataaaccttggcccctgtatcgcaatgtaaaagagatccttttatatccaagcgcttattatgcgccgcaaacctcccgcgataatgcagggctcgtaagctatcacaataccgtgcgccaaggagagtcttggccgggtggaaccttagtactgagctggcatgatgttcttgagggcaatcgcttaccaagtgatggacataatttggtgtttcatgaatttgctcatcaactcgaccaagaaacagggcaaaccacaggcacgccattgctttcgagtaatgaggattaccaaaaatgggcgaaagtatttagccgcgcatttaatcaactcaaaacccacttagcctatggcatgcctcatgttattcacagttacggggcaactaatgaggccgagttttttgctgttatcaccgaaacctttttagaaaaacctgcagaactcaggcagtttgacccagaaatttatcatttactggttggcttttatcagtttgatccgattgcgtggcattagtcgtctatttacgtctgtttaacacgtattgctggaatcttgctatgctatttggtgcaatcttaaaagtgtgcatataagcaaaacaataaaaagtgagatttcaatgaagaaaatgcttcatacagcgcttgctgtatcgatttcacttgctctatcagggcaagtggctgcaactgagcaatcaagtgatgacaaatggcaggtagatacaccaaaaggccaattcctagacgctaaaattagtgttgagcaaggcacgtggatgaatgttgatattagccctgatggtaaaacagtggtgtttgacttactcggcgatatttataccatgccaatgtcgggtggtactgcaacgcaattaaccagtgatattgcatggcaaatgcaaccacgctttagccctgatggtaagcacattgcgtttacttcagaccaaggcggtggtgacaatatttgggttatggatgtaaacggtgaaaaccaaaaggcagtaaccaacgaaacattccgcttgttaaatagcccagcttggagcccggatggcgactatttagttgcgcgtaagcactttactgcaagccgctctttaggtgctggtgaagtatggctttaccacaaagcgggtggcaaaggtgtacagctaaccgcacgcgagaacgaccaaaaagacttaggtgagccaatgttctcacctgatggtcgttatgtttatttctctcatgatgcaacgccgggtaaaacattccattactctaaagattctgtagcgggtatttataaaattaaacgctatgaccgtgaaaccggagagattgaaacaattatagatggtatgggtggggctattcgaccaacaccttcaccagatggtaaaaagcttgcgtatatcaagcgcgatgatttccaaacaagcttgtacttatatgatcttcacaccggtgagcatacaaaactgtatggcgagcttgagcgtgatatgcaagagacatgggcaattcatggcgtatacccaacaattgcttggacgccagataacgaacaactagtcttttgggcgggtgggtcaattcataagctagatgtcgatgataagtctgtctcgactattccatttaaagttgagaccaataagcaaattcaaaaagcagtgcgctttacacaaaacatcgatagcgataattttgatgtgaaaatgctgcgtaatgtacaaatttcaccagatggtgaaacagctatttttgaggcgctgggtcatatttataagcgtgatttagagtcaggcaaagtaaagcgtctgactaagcaagacgatcactttgaattattcccgcagttttctcgtgatggtaagaagattgtttacaccacatgggatgacaacgagcagggctcagtacgtgttgtgtctgcacgtggtggtcgtggcgatactattaccaaagagccgggtaaatatgtagagccaactttcagcccagatggcaaaacagttgtttaccgtaaagcgtctggcggcagtatccttaatccaacatggtcattagagccaggtatttattcagtaagtgctaaaggcggtaattcaacacttatcactaaatcagggtatcagccgcaatttggtgcagcgaatgaccgaatttatgtgatgagcccttggccaaaaccaacattaagtgttgttgaacttgaatcaaaacaagttcgtaaactttatgagtcagagcatgcaacagagtttagagtatcaccagatggtcaatacctagcgtttgcagagcgttttaaagtatttgttacaccatttgttgagcgtggcaaaaccattaatattggcccgaaagatagccaattcccaattgagcagctctctgttcgcgcaggtgaaaacattagctggagtggcacaagcgataaactttattggagcctaggaccagagttatatcatgcaagcctagcgggtttatttgatattaaccaaaatgcagagactgactttaaagttaaaagcggcgataacatcggttttacaaaaaccatggccgagcctaaatcagtatttgcattaactggcgcacgcattatcaccatgaacggtgagcaagtcattgaaaatggcgttattgttactgatggtaagcatattaaagcggttggcagtaaagacagtgttgctattcctaaaggcgcaaaagtagttgatgtaaccggtaagacgattatgccgggtattgttgatgcgcatgctcacggctcgcaaggcagcgatgagatcattccacagcaaaactggaagaacttagcgggcttagcgttaggtgtaacaacgattcacgatccatcaaacgacaccacagagatttttgctgcaagcgaaatgcaaaaagcgggcatgattgtcgctcctcgtattttctcaacgggtaccattttatatggtgcaaatatgccaggttatacatcgcatattgattcgttagaagatgctaagttccatcttgagcgcttaaagaaagtgggcgcgtttagtgttaaatcatataaccaaccacgtcgtgaacagcgccagcaagttattgaagcaggtcgtgaacttgaaatgatggttgtgccagaaggcggttcattactacagcacaacttaaccatggtagttgatggtcatacgggtattgaacactcaattcctgttgccaatatttacgatgatattcgccagctttggtcacaaagtgatgtaggttatacgccgacactcggtgtagcatacggtggtatttggggggaaaattattggtacgataagaccgatgtgtggaatcacccgcgcttaagtaagtttgtaccaaagaatcagcttttacctcgctcaatgcgccgtgttaaggcgcccgatcatcactataaccactttaacaatgcccgtgttgcaaaagagctgcaagacttaggtgtattagtgaaccttggtgctcacggtcaacgtgaggggttagcagcacattgggaaatttggatgtttgcgcaaggtggtatgacgccacttcaagcaattcgtgcagcaacgttagaccctgctaaatacattggccttgataaaaatatcggttctctagagcctggtaaacttgccgatttaatcgttattgacggtaatccgctaactaacattcgtgatacagataaaatcgattacaccatgatcaatggtcgtttatttgatgctgcaaccatgaacgaagtgggtgagaaaaaacgcgaaaagttatattttgaagaaatttaacttagcggaaatctaaactgaaagcggccattgtgccgcttttttattgttctaaataaggaaattgtttaattcctactagttttgcttggcagatcatgccctcaacaagcgtcatcaaatagtggctctgtgagtttagctgcgaactatccatgttgttacagtttgataaacgctttttaattaactgctgtactgccattttatgctctttgcaggcttgatttatcgggcttgcaggatcagcaaactcagcggcagtgttaataaataaacagccattgaaatcacctaattcagtcacctcagagttaaaccaagcttcatggcagcttatcaacgctactttaaatgcttcaacagtagttagcttgctggtggcatgcgttaaccaatttaaaaacctgttatgtcgctcactaaggcacgctaataataactcatctttacttgcgaaatgatggtacatggtttttttggcgacacccgccacactaataatttcgtttattcccacactatgaatgcctttttgataaaaaagtgacaaggcggtcaaaataatatgtgttcgtttatccataacaaggcctcactagatgactaatgatagcttgacagaagtagaccgacttgtctactatttgatgggtagacaagtcggtctacttttcggagggtttatggataataaagtaagcaaagcggctattgcaggtatatttgcttgtatggcaatttttgtattggcctatttacagcaattaggacattacggtgtgtggttgatggcaccctttggagcaacagcggtgctagtgtttggtgtgccacacagtccgcttgcgaaagcgaagaatgttatcggtgggcatcttttgactgccttaatcggtgttgtatttgtaaattatgtcggtgtagggcctgttgaaattgctatagcaacaggactggcaattagcctaatgatgttgacagataccgtacatccagcggcaggcgcaaacccaattttgataatgcaatctatgcaaagctggggttttttagtgatgcccgtattaatcggaaccgtatttattgtgttgtttggctatttaagtcaatggatattaagcaaccaattgaatagtcataaaaaaaccgctaacgagtagcggtttttaaaatgaatgagtgtaatgagattacacaacaccacgcggtaaacgacaatcgtggtctttttcagctaggttaacaatccaaagctcttcagctttgtaaccatcatcgtttgctgtaacaacagtaaacggtgctttcttagctgttttagccggtgcagcggttttagttttggtttttttcgctggtgcttttggtgcttcttctgctttaggctcagctgttttaccagaagtgagctcttcagtcagcgctgcaacatcagcaaggcgcaagtttttgccaccatcgatgctataccaaccaggttttgtagtgatttcaggtttcttaccattcgctgcttcgtatgctgcttcgaaggcatttaacacttctgttttgtctagtttgctcatcagagaccctatacgttgtaaacacagattaagaatatatatttatacctattttcagcttacttttcaattttttgcgattttccttccatttttcactcataaacgccaaaatttgcacaaaatagagggttgaaggacgattttcatatgcaacgcaaacaatttactcaattattaaacgacattcttaaacctgattctatcgctgacttttgcccaaacggcttacaagttgaaggggcgagcgaggtaaaaaaaatagtgacgggtgtcacagcaagccaagcattgattgatgccgctattgcagaaaatgcagatacgattttggtacatcatggctatttctggaaaggagagtcgcagccaatcacgggcatgaaaaaacgccgcatagcagcgcttttaaataatgatattaatttatatggctatcacttaccgctagatattcatcctgacattggtaataacgcacaattggcaaatttacttggtattgagttcactggtgggcttgaatctggtccaaatagtgtgccggtaaaagggcgtttaaaaaccccactaagcggtgaagaatttgccgataaaattgcgaaagtacttaacagagcaccattaactagtttggtcagaaaagaaaaaatcgacaccatcgcttggtgcaccgggggtggccaagggtatattgatttagcggctgctcaagggattgatgcttatcttactggtgaggcctctgagcaaacgattcatagttcacgcgagcaaggcatcgacttttttgcagcaggacaccatgctactgagcgttatggcattaaagccttaggcgaacttttagctgagcagcatggttttgatgtaacgtttatcgatatcgacaatccagtctgattaagtctacagcgcctctggatcaatccagcggcgcacacttacccaagcactgccaattttttcatgagcgactctggtaacggcaaccagtacatcatcatctggtataaactgcttatatgttggatactgactaaaatcttggaagtcagttgccgcagggatcacatcaacaccttgtgcattaaataagtctttcgctcgcggcatgtggctcgcagaggtgactagggcagtttttttatcgactaaataaatggcaagtcgcttcgcttcttcagcggtatccatagcgaggggattttgcttaattcgggcgcctttaatgccgagcgcttttgctgtttcaaacatgagctggctattggtggtgttagcaaaaccgccccctgatacatagagagtggcgtttgggtagtggtgggcaagcttaacaccttcaagtaatcgagcaagcgcacaatcgcctaactggtgattagcggcaaggcgagagttgggcattatagagcagccaagtaccacaatattatcgagtttagggtgttttgcttggttaaattgccatgcagggttattgcttgcagctatcagtgactgaccaataaatggcgtgcttatcagcattaaatttaaaatgctagcaaagccaaagtagagtgctttgcgtttatgggcaatggctaaaaataccatcactaaagtaagcagccccaacaacggcaggggcattaataatgagccaatgatctttttaatttgaaacatgtatcagcattattgtttgtaacagatgcagctatgttaattattttgcctttctttagcgaccgttattttgcttacacgtatttaaaaagtggcgataaacagggttatctttcatattctttttcatcgctaaatacatagggcgagtaaggccaagtgcacctaacggaatcgacttaatgagtccttggctttcataaggggtgactagccaatctggtaatgctgcaacacccattccagcgctcactaattggaaaatcaataaaccttggtcaaccgttttaagcgtgccatcaaagcgtgcattttgaataaaatgtttaaagatatcttggcgctctcgcgggatagggtacgaaataatagtttcgttttttaaatcaagggcggtgacataggctttttttgccaactcatgatccggtgcaacgattaattttaatttaaaatcaaacaggtgagcatactcaagctgatcgggttcacgaatatcagaagtcagcacaagatctaactcatcattaattaaatctggaatggcgtcataactaaagccgcgctcataatcaattttgatatcaggccaaaagttattaaattctttgatagttggtagcaaccaatgaaagcaggcatgacactcaacacttaaacgtaaatttgaaattggctgattcaggctttcttttaaacgacactttgtcgcttcaactctcggtaaaacctcattagcaagctccagcagtaacatgccttgcggtgtaaaacgcacaggctgcgtcttacgttcgaacagttggcaatctagcttattctcgagatctttaatttgatgtgataaagccgattgagttaaaaacaactcgcgggcggtattgaccagagagcctgtctctttaagggtcgctatggtttttaggtgctttatatcaatcatctttaaaaaatctcatgaaaaatgtgagccaaactcagattacgaacatagtacgcttaagaatttgttttttcaacgtctagacgtctaaaattcgtggttactttaactgtttttttacaatacgcttttttactgtcaattgacatcgctgtcattgtttttttacttaacttatatcaaaaagctatgaatatacctcaagttggtttttggagatctctttaggtttttgattaggggtaactcacttctcacttaggcaaaggggcctgacttacaactaagatattatttttaaaactgttattatcgtgcaatcagtacgattttatttttcaaagggataccagtgttacgtacactacttttaacctgtgcttgttgggttatgcctgctctcgctggcactatttacagccagtttccaacagagattgatccgcatgagcactatgttttttattcccatggttttatcgtcgaaggtaaaaaccctaagcctgttcacaaaacctttggtgtttatgactttattgcggtaaaagaagcacttgcagatgatagctatcatttaattgcctatcacaggccaaaaggtactgagccatttgcatttgcgaaaaagctcgctgcagatgttgaagcattgatcagcgccggtgttgatgagtcgaatattagtttggttggtttttcacggggcggggcattgtcgatactggcagctaatgagcttaaacgcacacatattaacttagttatattggcagggtgtgctggcctaataaaaaagaactcatcagttaaagcttacggcaaggtttactctatctttgaacgctcagatcaggttggctcttgccagtttttaattgatagaagtacagtaactaagttcgaagaactaagcatcaatacggggctctcccatggtgcattttataagccaaaagatgagtggctgttaccaattaagaagtggctaaaggattaactatgccttatttattgctcgtttttgtgatcagtgttttcggcgtgagctcagtaagccatgctgagccatttattttgccacgtactaatactgtgttacttaaagataaacataccgaaaacgaataccccattacaattaaactgccacgcagctaccaaaaacaaaaccagaagcgctaccccgttgtttacctgttagatgcaaactacagtttgccaattgcctctggcgtcagtcgcttaatgatgaattcgggggcgatggaagaggtgattatcgtcgcagtagggtatcaaaaaggtttgccggggcttaatagccgtatttatgactatacgccatttgaagataaaaattggcaacgtaaaactggcggagcaagccagtatctaaactttctaaaacaatctgtattgccatatattaaggctcactatagaacaacccaaaaaagtacgttagtcggtaactcgctgggtggtttatttgcttcctttaccttattcactgagccttcgcttttttcaaattatattatcggcagtccttcagtgtggtttaaagaaaactcaatattagctatggctgtaaaaccagctgccaacacaacaaaagtttacatcgcagtgggagaacttgaagaaagtgaaggtgaaaaaatggtgtcgggcgcaaggcaattagcagctaaaattaataaacaaagcggcgcgcttgttacaacaaatttatttgttattcctcaggcacgccatgcaaccgcattcccaacaacgattacccaagccctagactggatttaccagaccaataccaacccgcaataatacttaattaagcggattggtataagagcaattaaagagcgtgacactttttatattttttaccgctaccacaagggcactcgtcattacggccaattttaatatctgcaactgccgttatatcaccatctaggtaacgccataggccatcttctttaataaaacgcgacttttcgtgtaactcacaatataagctttggtaaaagtaatttgctttaaattctacaaaaccttcttgatcattatgttctgtatctaaaacacttagcttggtaaaacggcagctattagcaaaatctttaatttcgcgaaccgggtttgcggcttgttggctttgtgcataggtgctaaatacatattttgcatctttcagcgcgtatgcactaaaacgagaacgcataagttgctctggcgtattagcttggcttgcacctgtatgaaaaggttgacagcaaagctcgtaagtcgattcgctgccacaaggacaaagggggtgtgtgagtgatgtcataacaacttacctaaaactataaattgttattttaacaagcctattgtggctgcggtactaaattgtttaattgagcgctttttgtaaaacaataaaacttagcagatgcttgctcaagatttagattcatcgaatcaagttgatgattgtttacaatatctgtccatgtgatcactgcggcaaaattaccattatgtaatgcagagctaagtacgtactcaaggttaactaaatgcttttgtctgatcacaagtagtttgctggtatcaatcgaacacgaatctaataatgctttgctaggaacatgatcaggggcaattaatagtgtccatgcattttggctattgtaatgatgcaatacttttaatagctcaaaggttgctgatatttcgtcttcaatttgaattaaattaacagacgctttgtcgttatcttgttggtagcttttaactgttcttaaggtaattggctgtaacataactttcactcactggttgtttatacagtatgtgtatacagtagtttatacagtgtttttgcgcaagtacttttttgctattttttaaccaattattcagttttatgttaattaaatttatttagttcttattaaacaatgggttacttttttgttttggaaggttaaaaaggtgaaaaatttatcattaaaattatacagtattctatacagtactgtatgagctgctatattttgcttctatacaggtgttttgcataaaaaagccggtttaaaaaccggctctttatctttgcaattttgctatttgtctaagtaggtatttaaaaactcaagatatgcgtttgaggctttaatgcggttttcctttttagtaaaaccatggccttcatcatcgaataatacatattcgacaggcacaccatttgcctttacagcggcaacgagctcatcgctttcaacctgtaaaacgcgtgggtcattagcaccttgaatcaccattaatggcttagtgatgtttttagcatgaaatagtggcgaaattgcacggtgacgctcactgtctgtagcggggtcgcccatttcatcgtacagtgcctttttaaagctttcccaccatggtggaatcgagtttaaggttctaacccagtttgttacaccaaagatattaatgcctactttgaattcttcaggttcaaaggcaagtgctgcggcggtcataaagccaccgtagctgccccccatgataccaattttatcggcatcgacccaatctaggctttgcaggtgttttttaccgtaaacaatatcttgtaaatcatcagtgccatgttttttatcatctaaatggaagaaggttttaccatagcctgagctgcctcggttattaaccgcaaaaatggcataaccatgattgactagatgttgctgcatcgcactatatccagtacggctttgtccaccagggccgccatgcacccaaactaaagcaggtactttattgttgctgttggcttgcttaggtttatataaaacccccgggatttctaagccatcgaagctcttaaagcgcacaattgtgctctcaactaagtcactttgattaattgcatcacttaatgtgttagttaattgtttagctttcggctcaccgacttgccacacaaataaattgcttggcgaggtgtctgaatttaaataaaacgccatagttttttcatcagctgaaaaattaacaccacgtaagttacctgcaggcaacgatggcatagcaatacctttacctgtggtggtatcgattatcgacaccttagtgctggcgtcggcattaacaccacttacttgataacggccagatttagagaagtatataaagctgacatcccactcatctttgagggcagggctgtgctcgccggtagttaagtcataacgccacacttctgcaaactcacctttagcatcggttgagtaatacaatgatttactgtctcttgagaaggtttctgggccatacttagcgtcgtcgtcatgacgggtgataagctctggtttaaggttttttttaagcgtatcgagaatgaacacatcgctgtctttgttcgaattgtttttcgataaagcaataaagcggccgtcagggcttatcgcaccgacatccagccccatggtattttgataaactggcgttacttcatagctgttagcatcaacaagatataggtccataaacttagcatcacgctgattgctggttataaaaaagtgtttaccgtcttctgtgaatcctgcaaatcctgcacgggtttcttcacctggggtgaggtctttaactgtgccgtctgtttcgcgaacatagacgtgataacgctcgttaccacctgagtctttagtaaatagtacgcgctcatctttaggaaaataagccactgcataagtactgtcttcaaagtctgttaagcgggtttttttggcggtttttatatctacttcatacaggctataaatgccgctttcatcactgctaacaagtattttgtcgccttttggtgaaaagctgctgcccataattgaggttgtatcaaaaaaggtttcagcatcatactgtttaacagtttggctttgttgcacgctttcggtgctgcttgttgattgggttgattgtgaacatcctgcaagtgcaaggctgagtgcacatgccacggctgctagttgaaaactcggtttcattgtaattattccttgttaatttttcgttataaagtgttgcctgttcataatctaaacgcaagttttacccgttcgatatttgtttcaaatcatgtaaataaatagggacatgagtgtgatattatttttccactattaaaggaagtaaacatgattgcaataaacaacctcaataaacgttttgcctcagcccacgtttttgaaaactacaataagcaattacaaggtaaaagagtttgtttacaggcagccaatggcagaggaaaaacaacgctactgatgatgctcgctggcctagaagagccacagtcagggcagattttatacaataatgaggcattaaaatcaccgcaaaacgatgtttcaattgcaagcgatcgtattgtgctgcctgattttttaactgcgaggcaaattattgaacttagtttcaaggcattaaagaaagacgtaccaaagcagctcattacaggttttaactttacagagcatctcaacactcgcttcagttctttatcgagtggaaaccaaaagaaatgccagcttattactgcttttttaaagcaagccccatttttactattagatgaaccgagtgcagcgcttgatcaaacaagtattcaatttttgctgaccttacttgatgactacttagatgataaacctaatgggcaaatcataatcacaagccacgaacctcaggtgtttatacagcacggttttgagtgtacagcattatgattgactctcttgctagctacgtgtcattccttgcttatcgatacttagcatatacgactaaccttaaaagcatgctgtctcagttaaagagctttagcttgttgctcgcactgttacttggccctgcatttcttggtatggttttactgttgtttttagggcttgggaaaatagtcgatagccatgcagaacctgcttctggcgccaaattagcattggtttatcttttacttgaatcggtgatgttatgggccatggcgccagccattaaaaatgtgcaaaacagggcatttcagcgaagcctttataaaccctcttggcgagtatgtgttgactgcaagttattatttttaagtaatgtttggctcattgcgagtttattaatagctgtagatttatcgttgaaacaatggctacaagtgcctcattttatgatttttgtgtttttgcagtggctatgtggggtatttgttctttataggccaattgcacttttttatagcttgttaataagctctgtactgatattactgcctgttagtttatcttcgctgcaatactatctaggatttgttgctattttcagctgctcgactttaatcccttctgtaagaattagccataagttgaaagtacactcgtttgctttattttggtttagttactttttacaacacagttggtgtttaatatggcgttgctcagttctggttgcatgtttgttttctttattacagctaataacaattcggagtgactttagtgatctgatacaggctgtagctttatcagtatgtgtgttgctaactagctcgttacagttcgattgcatggctgtttttaaaaaatatcggttattctttcaaagtaataaccaagacaatctgttttatgtaagccattttataccgagtcttatattttttgctgtggctttaatggtagttataagcatgcttggcactaacttaatttacatacccattggcgcaggctggtgtttattacagcaatatatagcgcaaaaaaaaccagcgcaatttgcgctggtttggtttttcataacaattggaattgttttgctagcttaggcagcgtctgcttttttatcgctttcgccacgggctactttaccagcaactaagtctgctgggtcaaagtcgtcaacgttaataacgtcaagacgggctttttcaacagcagctagtttgtcggcttctgcttgacttaaaatgccagcttctaggcccatttgcgctactttatcaagctggaagaaaggcagttttacgcctttttcacggcataccttatcaaacagcggctcaacttcgagaatgtctttaagcgtttgctcttgacgaccaacaaggttaagtggttcgtttttaaggtaaatgtagttagctaaacggttacgagtttcgcttggtacttgtaataagtgcgcaagtttatgctcaagcttatcagtaggtttacgaactggacgaccgaatgggaataacataatttttagcattgcacgaagtggtgcagatggcatgttattgattaggtcagcaagagctcgttgacagtggtaaaggtgatcttggcagctccattgaactagcgcaaaatcttcttttttacggccttcgtcgttgtaacgtttaagtgttgcagatacaaggtataagtagcttagtaagtcacctaaacgtgcagagatacgctctttacgcttcaatgaaccaccaaataccgccatgctgatatctgacattaatgctaatgatgcactgaaacgtgacgcaactcgataaaactcagctgtttcgtctttgtacggcgtacttgtgaagcgagcattcgttagtgctaaccacttagtacgaacaaggttcgaaatagtaaagccaacgtgacccattaatgctttatcgaatactgcaagcgcttcttcgcggtcttcaattgcacaagcgcctagctcagttaacacgaatggatgacaacgaattgcaccttgaccataaatgatcatgttacgcgttaagatgtttgcaccttcaacagtgattgcaattggcgcaccttgataaccacgacctaggtagttgtttggaccaagcatgatgcctttaccaccatgaacatccataccgtgaattgttgcttcacgcatttgttcagttaagtggtatttgataatcgcagatacaaccgatggtttttcaccaaggtcaacagcaccggtagacatgctaacggcagcatcagagctataagcgtagcctgcaagttttgccattgattcttcaacaccttccatttgaccaataggtaaacggaattgacgacgaatacggctgtaagaacctgttgcaagcgcaattgttttaatgccacctgttgagttagacggcaaggtgattgcacgaccaacagataaacattcaactagcatacgccaaccttgaccagccattttcgggccaccaatgatgtaatcaagtggtacgaagatgtctttaccgcgagtaggaccattttggaatggtacatttagcgggaagtgacgacggccaatttctactccaggagtatctgttgggattaacgcacaggtaataccaggttctttattatcacctagtaaaccgtctggatcttgtagtttaaatgcaagaccaagtacagtcgcaacaggagcaagagtaatgtaacgtttgttccacgttaggctaataccaacaacttcttcgccgttccattgacctttacaaacaacaccgtagtcaggaattgcacttgcgtcagaaccagcttctggtgatgttaaagcaaaacacgggatctcttgaccactcgctaaacgtggtaagtaatgatctttttgctctttagtaccatagtgctgaagtaattcgcccggacctaatgagttaggtacacctacgatagatgaaagtaacgttgatttacttgttagcttttgcagtacacatgattgtgcataagcagaaaactctaaaccaccgtattcttttttgatgatcatggcaaagaatttattatcttttagatattgccaaacatcttgcggtaaatcagttaattcgtgcgttgcgtgccagtcatctaacatgctacacacttcttcaactgggccatcaataaacgcttgttcttcgatagtcagttttggtgctgggtattggtgtaatttgttccagtcaggacgaccacaaaatagatccgcttcccaccacgtagtacctgcatcgattgctgatttttcagtatccgacattgtcggggttacttttttaaatgcagcaaaaataggtttgatgatgtattgttgacgaatgcttgtcacagaaagtggcacagcaataagtaagaatagtagccaactgattgcaccaaacgcgccagcaaaagtgccaacaagtaaggtcgcaatggcaatacctaaacaggtattccagctcgatctgtggtaactcgccacactgagtagcacgagtaaaccaagtaaaaatatgagagtcattgattattccttaatagaggtcagaccacctcttttagagtagcgctacaaccatgaattatcaagaggggaacaaagataaaacgatgctttgtaaaaccttttaatgagtaaactgtatgaacagtgcaaaaaaatttacagtgggcttatgaatatttagtttatgtaaatggtgcacataaaaaggtgtgtaaaatatgcactatttatcagatagttctgaaaatctcagcatagcagttgccatctttagcgctatgtacaacaatgagcgcaggcagggatcagcccatcatgccttttacttcgattagttttataggttaagagttctatgtgtgagttgcttggcatgtcagccaatgtaccaacggatatttgttttagtttttcgggcttattagagcgtggtggaaacactggcccgcataaagatggttggggcatcaccttttatgagggtaagggctgtcgcacatttaaagatcccgagccaagttgccaatcagaaattgccaaactcgttaaagcgtatcctattaaaagtatttcggtgataagtcatattcgccaagggaatcgtggtcgtgtatgccttgaaaacacgcatccgtttacccgcgagttatggggccgtgaaattacgtatgcacacaacgggcaattatctaattatcatgatttaaagccagactattatcgacctgtcggtaacactgacagtgaactggcgttttgttggctgctcgataagatccgcgaaaaataccctaagcggccatcaaatatggcgtctgtatttcgttatgcggcaaagcttgcccatacgctgcgcgaaaaaggcgtatttaatatgttacttaccgatggtgtttatgtgttagcttattgcaccaataacctacattggatcacacgccgtgcaccgtttggcaaagcgacattaattgatgcagacatggtaattgattttcaaaaagaaaccacaccgaacgatgtggttactgtgattgcaacacggccactcaccaatgatgaacgctggcagaaaatggaacccggtgagtttgcactgtttaaaatgggcgaaaaaatttaaataaaagatgaagcgctattaaggcgcttcattactcacttcatttgttacggcgactggtgtggtcacagtgaatgaattaagctgcacttcaaattgctctacgcctttttcacctttccacatacgcacgagcatatagtccatttctggggcaaaccacgccaatgcttggcgtttatcgttatcatataaacgtttaactttaatcgcttctacattaccaacaggtagcgatatcacttcggtgccgataacttcaaagtcgtaattgcgcaggttgccttttttatcaatcaatggatacgataattgcgttttaccttgttttaactcttcgcgcacttgcacttggtaagacagtgaatcttgaaaatcgtcagaccaatcaagctttaatgggtatttactttcgctgctttgtacttgtttttgcgccgcatcaaattttaagctgtattctttatcaggccctgtgcctgagcgctccatggtgtaacttagcggagaaattttttgatcatggtaagtaaatttagatgtttcttttcttgagtcagaaaaaatcatccattcgatttcgctgtgataagtgatcacgtagttaccgtcggcggcttttttaagctcgcggattgctttaccatgggtttcgcctttacgaagtacatcgtatttggcttcatattgagtgagatcgccagctaaaacactggtaggaagtaataaagtgcccacacaagcgagtagggcacttaaatttttattctggatagtgcgcgccgtgtgcaggaagtttcttttcgtcaaaaactgcataatctgcttccatcttgagtcgttgttcactgaaccacttgaccaccaatggatagattatatgttcttgctgatgaacacgttgtgcgagtgtctctgcggtatcgttttcgagtaccggcactttggcttgaagaacaacgggaccgccgtctagctcttctgtgacaaagtgaacactgacaccatgaacgtcatcttttgcatctatcgctcgttggtgggtattcagcccttggtacttaggcaacaaagaagggtgaatgttcaacatttttcccttaaatttttgcactaagctaggagtaagaatacgcataaaaccagctaatacaactagatttggttcaaaattgtcaataatgtccattaactcagcatcataggcctcgcgcgagtcaaaatctttatggctaagtacacgtgtttgtatacctgcattttttgctcgttcaaggccataggcgtcggctttattactaattacagcggcgatttcggcttttatctcaccacgcgcacatgcgtcgatgatggcttgaagatttgaaccgctaccagaaattaatacaacaagacgacaaggggtcattagtcacgaccacctaaaatttctacttgctcttcgcctgctttcgcatcttggatctcaccgatatgccatgcattttcgccaagatctttaaggattgttaagctttgctcaagtttgtctgctggaacaactaaaatcataccaacaccacagttgaatgtacggtacatttcgtgtgttgtgatgttgccgttttcttgtaaccagttgaaaacaacaggccattcccagctgtcacctttgataactgcttttgcagattcaggaagtacgcgcgggatgttttcccagaaaccaccacccgtgatgtgagataacgcgtgtacgtcaacctgcttgaatagctcaagtagttgtttaacgtagatacgagttggctctaaaaggtgatcgccaagtgttttgccttcaagctcagcgctcgtgtctgcgccagatacttcaagaactttacgaattaatgagaagccgtttgaatgaggaccacttgatgcaagggcgattaattggtcgcctgcagcaactttagtaccgtcgataatttttgatttttctacaacaccagtacagaaaccagccatgtcgtagtcttcgccgtcgtacatacctggcatttcagcagtttcaccaccgattaatgcacagccagaaagctcacagcctttaccaatacctgttacaacatcagccgcagtgtctacgtctaatttaccagttgcatagtaatcaaggaaaaatagtggctctgcaccttgtacaataaggtcgtttacacacatagcaacaaggtcgatacccactgtgtcgtgctttttaagatcgattgctaaacgtagttttgtaccaacgccgtctgtgccagcaaccagtacaggctctttatagccagttggtagttcgcaaagtgcgccaaaaccaccgataccgcccattacttcaggacgtctggtttttttaactacgcctttaatacgctcaacaagtgcattaccggcatcgatatctacgcccgcgtctttatagctaagagactgtttttgttcgctcacaggttttcctcaaaaaagttgcatgtgggttgcttagaaacgcgcgtattttacaacaattgcaatggcgcggctagttgaaaaatcactttaaccgacttgacaaggacagttgtccggtttttttgctttcaagttacaaggcaaaagtatcaagtaaatgtcactttgaccttgtaactagagacttctcactatttgttaagctttcgctgttaaaatagcgcgtaggggggctgggtaaccttcgatggttttgctggtgtcatttgggtctaaaaagtcgaccaatgattcgttttccatccactgggttttacgttgttcttcaagcgttgtgattgcacagtctttaacttgcacatctttaaagccaacgcgctccatccatagttttaatgccgctgtgcttgggataaaccacacattacgcatttttgcataacggtcagttggcactaaaactgtgtgctcatcaccttcaacaaccagtgtttcaaggactaactcaccgccaggacgaagctgcgcttttaattgcgctaaaaagtcgattggtgaacgacgatgatataaaacacccatcgaaaataccgtatcaaatgcttttagctctggcagagcttcaacacctaatggcaataaatgcacgttttcatcttggtgataatgctttatcgcttgaaattggcataagaataaatcagatggatcgatacctactacaaaattagcgccttcaccgcgcatacgccacaagtgataacctgaaccacaaccaatatcaagcacagtgcggccttttaacggttcaatatgaggcagtaaacgatcccatttccaatcactgcgccactcagtatcaatctcgataccgtgtaagctaaatggtcctttacgccatggcatcatgcgctttaataaatgcgttaactgtttttgctgaccctcagatagctcatcaccggtaccgatttgtactttatcctgcaggtttacatggtttgtgcttacctcaggtaagtttttcagcactttttgccatttaggtaaatcgccgtggctggcttcgagttcccagtgctttaattggccaggtaaagtttcgagccagttactaagcggactttgtgcgatagcagcataaaattggttaaaccattgagacatgaaatactctttatatcgttgtgatgattacttgattgcaatcatcgaacagaagttaaaacattgataccacacttgcgtttggctaaaaccaatttcacttaatcggtttaagtgggtagataaatgatcagggcgcatgacattttcgatagctgtgcgcttttggctgatctcaagctctgaatagccgttatgacgtttaaaatcatgatgtaaatcaatgagcaaattatcgcattgctcattttcacccctaattttttcgctcagcagcaaaacgccgcctggttttaaatttgcgtaaatcttttcaagcaccgcttggcgcttttcaggtggaataaactgtagtgtaaagttcatcgccaccacagaggcattctcgatggctaaatcgtttatatcacccagcatgacagtgaccggcacgtcagagcgaaaaccttgtaaatgtaatttacaacgctcaaccatcgcttctgagttatcgacggcaataatattacagttatcggtgcgaatattacggcgcatacttaacgttactgcaccaagtgaacagcctaagtcgtataggtttgaattactttgcgcgtattcgccagccagtttacctatggtgctaacaatggttgcgtaacccggcaccgagcgctggatcatatctgggaaaacttctactacatgttggtcaaagctaaagtctttaaccgcttgctcagtggcataaatactgtctttttgcgtcacgtgaacagtctctttaaaaaataataccgctattttagcatttttaactggatagtcagtgataaattcagtagcttggctagaattatcaataacaagtacaaaaaagagaagtttaatgacaaaaagcaaagtgattagtacagaagatatcttatcaactctgtgtcattcagtgactggagttctgtcttcagcaagtggtaatagtattagttattctgccatggtacaaaaaataacccgcacctgtatgcgcccagatattggctgttttgtattgttcgatggtggttttactggccttgtggtaacaaacttcactgcccaagcagccatggaaatttaccatgactatatgcgcaacatgggtatgccagaagacgaaattgcacaaagccatttatcagatgatgtggcaaacgtactcggcgagctgatgaaccaaatcgttggtgactttacgtcaaaagtacgcgaccagctgcatacttctattacgcaaaaccaacctaagatgatggcgattaacaaacaggtgcaaatctctgttgataccaccatggatagaccacaagcacgccgtgtgacattcactacagcgaagcaaaatatcttctatctagagcttgcaatggataaaactgaatttatcaaactacatgattttgatatttcagaagccgttgacccagatgacatcatcgaaaacgaagctaaacaaaaagctgaaaagcaaaaagcatcatcacaagcagacgatgccgatgatgattttatggcagaacttggtttgtaacagcttacgtaggttgggtagagcgtagcgaaacccaacgacatgagctgtcagctatcagataaaatagaggcgcggtctagaccgcgcttttttgtgtttaaattttctgttgagttcaatgtggatttgtttatagattctaaattacacatccatatttaattttctaatttcgccagagcaacataggatcttcaactgaggataatttagttagtactacccaatcagttcctttcccaaacgcatcttttacaaaccaatccatacggatgaaaatatcttggtaaccatcacgattaaagtctgcacgtgcaacttgagtataatgcacctctaaaccatctacctctaccgaaatactgttttcacgtgatgctgcaacgaacgtaaggcttttatcgtaagaagataaactaccagttcgcccttctaaactttcgcctcctaaattgggaatcgccgaagcaggaaggtgcttaattgtttcgtagtcaaataattcaggccagaaactataggcagtttttggtgcgttgaagtatctatttgcccccacacagttggctttaagccattgccagcggtcatactcccagtccacaacaatatcatcgccgctttgaagtacaaaagagcaccctttagcaaaaaatggcttttcatcagttcctgtaaactcaatattgaatttgatatcctccaaagagccattagtctcgatttgttgttcaaatatcaatggattcagccaagcagtttcaatgttttgctgttgttttgatggttggttgcttgtagagcaagcgcttaacaaggtaaaaataacactaacgtatattcctaaacgtaataattgctgagacatgcttttaacctcttaaggtgtgattgtctgtttttgggcagaaaggaataagttgctgacatagttgtttcgtgaacttgaaatgccaacccttttactctcagctgctgcaacaatccagtcttctttcttaatggcgttattcatctttacatactgcgtacgcagctttgttattcccaaattaaagaccatatcaaataatgctttctgtactgaatagggcattaaatcaaagtttttagcgaagccattagacgtggtgtaatatttagtaagttcactatagaattttaaaatgtgtttttctttttgcgccactatatcatgttctttcataattaaagttgtatgcaatttgtaaaaatttgcattgcgactaaagccatagggttgcttttttatcgagtcatactcagcttgcttctcagctaatgaagctaacacaagcgtgttgtttgaattctttttatacatgacaactgatgccatggctgctttgtttgaaattagatgaccgattcccacagtaactaaccctctggtatcaagatacaaatgaggaactcgtccttcaaacttctcagtatttttaataacctctgtttttacgtttgcatttaatggcattagatattcctttctttaccttttattttattaggagttaatttttgttattaacaagatttaatattaactggaaactaactttttaattgtatattggtcctgtattgggttcaattattaatttgatattaatgcgaggtttgttgaatcaataaatgggggcgttatgtgtattgttataaagtgctaaatagtaaacaaatgcaggggtggaatgcggtttaagttgcaatttaacattttttaatgtgtacgttacagaaccttttgcaaccatgttttctcatctatttttagataaattgcgctagtattctctgaaaccaataatatcccgttaggaaaagaagttactctaaaattaaatttttctgcctgcattattgaaaaaatagaaacatataaatcgttttttgaagcttgaatatcacccttagactctaaaatattcaacatcatttcaaatgcttcatctaggctcattgatgagtttatagtactggatgaaattgcttcagcacctcgacactctgaatacaaagtagtttcacctagttgcattgactctgcacattgctctgcttttgcgcatccaatagaaagtaataataaagaaagtattaaagtgaatttcaatttaacgtgcataatctacctctattctccaacccctccactgtgaaaaaataatttcaagcattctaggtgttcgactgaagttatccaaaattgattaaatagtcaaaagagtttttatctagttgaaaaaggattcttaattttaaaatggtttataatttaaatttattcttttttgttgaattctctagtggcttagcatttcgttgaccatctcattatctagtttatacatgtctacaacacgattgattactgcttggtagtttttagtctttaaatcttctctattataccgtctccaaattttaaatagctctcgatagtgccctttatacatagaaggtggtttagtggaaagcaataacaatgcttctgcttcagaaagtttctgttctttttttaattccacagcctttaagtaattgtttagaagagcagccccttgaggatcaacatctgcagaggttagatcgatgttttgctcggttaggctttgtgtttcttttgagatgttcacagttggactgtgatttttctttttgtaaaaccagctgaatatgctcacgctctctccgattaatataaatggtcctagttatcgcaagaaactggttaaaccactcattcagtatttactttaaagcttaaagctcgttttaaagcctacattcatccaatttatgctttactcataaagccttaaatggatttgatgattgcatgaattacttaaaaaactttataactaaatttgttttcatgatgcagaagcggccggggttgatggcggtgttggctttttgtagtggtgtagcgagctatgtctttgttgagcgaaaagaatcgttttcgcaacttatctctattttgctattagtcacttggttgtggttgttaatagataactggctaagagataaagtagaggagcgttttggtgtggctgtgtcgcccaacgtgatgcgctttgcgctgcaagttgtgcagcaagaaagtttgttttttgctttaccatttttcttggcggtgactacttgggaccatggtcaggccgcgttcaccgctttaattattctttgtgcgttcgtttctgttgttgaccccctctattacaaaaagcttgcaaggcacagtgtgtggtttagtgtgtttcatagcttttctttgtttgttgtgctgtcggttaccttacccattttattaaagttaacgaccagccaaagttttgaaattgcgctgatcacggctgttattttaactgtccctagtcttggcaatttgatgcccaatgctaaatggtggcgtttcccgttattggtgttattgctttgtgctttaagtgcagggctttggcaattacgtagctttgtgccacctgcggcactgcgtttaaccgatatgagtatgtcatatcagttagatgcacaagcacgtaaaccgctttcgccaatatcagaactcactgagcagagcttacatgaaaaaggtctttatagttttagtgcggtaaaagcaccgcgagggttaaatgaaaaaatcttccatgtttgggtgcataatcgaaaagaagttgaccgcatagccttggatatttctggtggccgtaaagagggttatcgagcgtggagccataaaacgaatttcccagctaatgctgcagggaaatgggtcgttaaagtggttaccgagtctgggcagctgatagggcaaagaaggtttgaggttacagaaatatagcgctaagttacaagctgaaagcttcaagtttaagaagtgcgagcttaaagcttaagacttacagctttaagctttgcgcttagtacgggttcttcccttcacctaccagcacactgaatattcttaaatctagttctaattgatgatattgcggctccatgtggcagcaaagttgatagaaggctttgttgtggtctttttccttaaaatgagccagctcgtgtacgacgagtgctttgagtagtggctcaggtgcgcgaagtaggtcgctattaatggcaagatcgtgttttcgggttttaccttgcatacgaaaagtatgggtgcctaaggcattcgtgaccatatcgccttgttttttgaatgcagcacggccaaaaggcagggcatttttaaggtagcgctttttcagctcagtggcgtaactgtataaagctttatcgctggtaatgctatgggcatcagggtatttgccctttaggtattttgcggccctgtcgccattaaatagttgtaacacttgctcaatgatgtgcggcgggtaaccttgaaaataacggctgtaatctttcatgttttctctgataaatcgggcgctaaaataaactgctttggcttgcttcgcgttcacctataaacggcgcaagcacggggtgattgtaacctaaatcttggcaaaactgtcttgctaaaagtggtgactggcgattatctgcggtatgaaaaaacaaatagggtgattttccttcatcaagccattgctttacttttttcagccatggctggtaatacgacttgtattcatgttcaagactggcaatcacaaagcgtaacattggctgatttcctgttgcaatggcatgcacaggtaaataaggctttttcttttgcgcatcaatgagtgcatcggtatcggcgggtacagcaaataaagcgcgggtatccatactgatacggtctatattattttcaattaatagctgatttaaacgaatttctgcatcatctttttgaaagaaaccggggtgacgtacttctataccgtaactaagttgtttgggtagttgtgcaataaaattagcaagaaggggtagggcatctgggccaaatgcacggggtagctgcaacataatttgccccgttttagcaaaaattggctcaaataagtttagccacgcattaagctcactagttatattcgtcagctgtaattcgtgactaaaacgccgatgaaacttaaaagtaaatttaaagtcttcgggtaccgcatcatgccagcgtaataatgactcatgacttgggtcagcataaaaactggtgttgccctcgactgagttaaagcattgcgcatactcactgagcatgtcggcgcttttacagtgactagagagcaaatttcctttccatgcggtgctagaccactgcggacaacctaagtacagcattaaatcaaccaataaatttaaattatgtctagtgtaacaaaagaaatgtttgctcagaagccggggcatatatttagccccccgacaggcactgctggcactcgcattttgagatggtttgggtataatgctctgccttaaatgattactttgtatagtggcttttgctctcaaaatagcgaactcttaagagcaggcggctataagtctttaactgacaggaatactatgcgctctatatattgcggacagctaaataaatctcacgtagatcaagaagttgaactatgtggttggatcaacaaacgccgtgaccttggtggccttattttcgtcgatttacgtgacagagaaggtttagtacaagttgtttttgatcctgaagtagaaggattaatggatactgctaataaactacgtcaagagttttgtgtgcagttaaaaggtgttgttcgcgcacgccctgatagccaagtaaataaagacatggcaacaggtgaagttgaaattttaggcacaagcttaactatcatcaaccgttcagagccattaccacttgattttaatcagcaaaactctgaagagcgccgcttaaaataccgttacctagatttacgtcgtcttgaaatgagcgaccgtatcaaacttcgtgcaaaagcgagcagctttgtgcgtcgtttcttagatgacaacggtttcttagatatcgaaacaccggtactaacaaaagcaacaccagaaggtgcgcgtgactacttagtacctagccgtgttcacaaaggtagcttctacgctttacctcagtcaccacagttatttaaacaattattaatgatgtcgggttttgaccgttactatcaaattgttaaatgtttccgtgacgaagacttacgtgctgaccgtcagccagaattcacacaaatcgatttagagacatcattcatgagctctgatcaagtgcgtgcaatgactgagaaaatgatccgcgaaatgtggcaatcattactagacgttgacttaggcgacttcccagttatgccttacagcgaagcaatgcgtttatatggttctgataaaccagaccttcgtaacccaatgcagcttgttgatgttgctgatttagtaaaagacgttgagtttaaagtattctctggtcctgctaatgacgaaaaaggccgtgttgctgtattaactgtaccaggcggtgctgagctttctcgtaaacaaatcgacgattacactaaattcatcggtatctatggtgcgaaaggcctagcgtggatgaaagtgaacgaccgtgctgcgggcgttgaaggtgtgcaatcaccaatcgctaagttcttaaacgaagaagtgatcaaccaattacttgagcgtactaacgcacaatctggcgacatcattttattcggtgctgacaagcgcaacgttgttaacgaagcaatgggtgcgttacgtcttaagattggtgttgatttaggcattactgatcttgatagctggaaaccattatgggttgttgacttcccaatgttcgaagaagatgacgaaggtacattgcatgcggttcaccacccattcactgcaccaaaaggtatttctcctgaagagcttgaagcaaacccagctggtgcattatcagatgcatacgacatggtattaaacggctacgaagttggtggtggttcggtacgtattcacaatgcagaaatgcaagaaacagcattcagaatcttaggcatcaatgcgcaagagcaacaagacaagtttggtttcttacttgatgcacttaaatacggtacaccaccacatgcaggtcttgcgtttggtcttgaccgcttagttatgctgttgtgcggtactgataatattcgtgacgttattgcttttcctaaaacaactcaagcatcatgtttattaacagatgcaccaagcaaagcaaatgcagatgcattaactgagcttgcaattgatgttgtagcgaaagacgctgaataattggtaaaagcctgatttacgaaaaccctaaggtgtatgccttagggtttttttgtgtttaaataaatacttagtatgttcttcaaggaaagagtgtgaatatcagtgcaactttaatcgggcaaataatctttattttgatccctgtttttgccgcgatcagctattacttaggtaagcgtaaaacctcaacaccaatcgtggtggccgttattggtggtttactagggctaattccattgttcggtcttatttttattgctgtacttgcgcttaaaaaagatattgagaccaccgcgtgatcgtaagccattccctctattttgagcacacctttgaagtaaacctagctgatcaaacgttttcacattgcgagtttgagcaatgcgaatttatcgactgtgactttaacaacagtcagtttgaaaactgtaatttagctgcgcttgggcttagatacacctcactcgaagaggtgagctttaaacagtgtaaattaaccagtgtgcgctttactgatgttgattggccgttacttgccagccgtgcccctgtgagttttattggctgtgaactaagccatagtagcttttttgagcttagtttaaaggctataaaaatgcgcagctgttttgccaaagatgttgattttagacatgcggatttatcatctgctgattttactgatacggactttcgtgacagcttgtttcaacaaaccaacctcagtaaagctaattttattggtgccagccacttcgccattgatataacagctaacaatatcagtaaggccaaatttgagcgttatgcagctctggatttattagcagggctcgatatagagctggtggattaaatatttttgctaatttgggttaaggaaagttatgaatttaagtcccatcaccttggaaggtcaatttgtaaaattagtaccgttaacgcttgagcatcgcgatgctttggtaagcgcagcttcggatggaaagctttgggaattgtggtttacctcggtgcccaatgaagaaggtgttgacgattatttaagcatggcgtttgaacaacagtcacttggtcgcgcattaccatttgctgttatcgataaacacaccgatgaggtgataggctcaacccgtttttgcaatattgatagtaaaaaccgccgtttagaaattggctacacctggtatgccaagcgctttcagcgaactggggttaatactgagtgtaaaaaactgctactgagttatgcatttgaaacacttaatgtgattgctgttgagtttcgtacccattggcataatcaggcttcgcgcaatgccattgctcgcttaggggcgaaacaagatggggttcttcgtaatcaccaaataatggccgatggctgcgtccgcgatactgtggtgttttcaattattgatggtgagtggccgatggttaaacgtagtttagaattcaaattagcgcagtcatagcaaattagaacagtcatagaatgttaaatattaaaaaggcggcgctaatactcgttttcactcttagcgggcaaacagcctttgcaaaccaaacagagacactgtttgatactgagcgcacccgccatattccggtgatcattacagcagccgatagcgaatgcacggtaaaggaaaagtgccccgtggtatttattggagcaggctatggtatggcaaacacagactatcaatttgcccagcaggcctttcatcagcatggttatttaacggttgaagttgctcatgagttaaaaggtgatccgagtttaaacccggagccaccctacatgaccacacgcatggaaaactggcgccgtggtgtacaaacccttgagtttttagccgtagaacttgcaaagcgttatcctgagtatgattttaataagctcactttatttgggcactcaaatgggggagatattgcagcattatatgcggctatttatcccgctaaggtagctaagctgatcacccttgatcaccgccgtatgctgatcccaaggaacaaaaatattgctgtactgacattacgcggtagcgatttcccagcagatgacaacgtattgctaacgccgcaagagctcgctatatacccagtgacgcaaattaagcttaaagattcgcgccataacgatatgtatgatggtggcccaaaatcgcttgttgtacgtatgagtaaagaacttaacgcgtttttatcccgccattgatgctcagttaaaactgagcatcaatgtcgctgcgaaaattaaaatagcccatctcgacaaggttgttatacacaccctcaatattcagtggtagccattgctggtacatttttaaatggctgtatttaggcaagcttatttctttttgtaaggtcgcaaggtttttaccttttaacatgccatcgcgcacggcagtgtgtaagtcttgaatatagtgtaagtacgagacaacatcatcgcggttgccagtatctgcatggccacctataaatgcagcaaaagcaggttcatttagcaccgctttggttgaatgcagcatgccgttaatatcgtaaccaatcaggtttttatatggcatgcggccaagcacaatccaatcaacaacataaagtacattggcaggcataaaacgcatactgacattacctcggccattattaggcccatagtaattaagcagcacgtagctatcacctaaatcgactttgagtgtatcggtaaaagtaagatcaggcagagccgtaggcactttatttaatttaaggtcctcagctgcaaactgatgagcaacgatagttgtgttggtatcgattagctcattaccgcccatcacatggtcaacatggctatggctgtacagcatgaatttgatttcggcgttaaaggttttcttgatatagttttttaggtattttgcggcgtcgctattgataggatcagtcactaaggcaaggttatcaacaatcataaaagcgctgtggtaatggccagcactaaagcgatatacgttgtctttaatattttcgactttatagtttgcttgctctgctgagataacctgattggtaatgagtatgagcgcactgaaaagtaacatttgcagccttttgaacattagcgatccttttgcgttgaaacgtgtctagttggtcatacctaagtttagatgatagtgcatattatactacttaaatgcttagttgatctgtatcaaacttaaggagttaagcaaggtaggggcggacataagtccttatgtttttgcctgtgtttctctatcctcgcgaagcgctataatgaagaaatgctatgcttagcacagacttctagaaccttattcactggaaaagacaatgcaacatttacctaccgttgattataaagcgagcgatgcggccgctcaatttgttgagtcactaagaaacacaggtttcggtgtattaaaaaatcacccaatccctcagtcattagttgagtctatttacaagaattggcaagaattctttaattctgagcaaaagcacgagtttttattttcaaaagagacacaagatggttatttcccaccatcagtgtcagaagttgcaaaaggctttaccgttaaagatattaaagagtactaccacgtttatccaaaaggccgtgttccagcacagctagaagaagaaattcgtgagtactaccgtttagcgaatgagtttgcagctacattattaagctgggttcaagctgaagcaccagaagaggtgcgcgctaagttctctatcgatcttaaagatatgattgctaactcagagcaaacactcctgcgtattcttcattacccaccaatgactggtgatgaagagccaggtgcaatccgtgcggcagcgcatggtgacatcaacctattaactgtattacctgcggcgaatgagcctggtttacaagtacaaacaacggatggcggttggttagacgtaccatgtgattttggtaacctgatcatcaatattggcgacatgcttcaagaagcgtcaggtggttacttcccatctacgattcaccgcgtgatcaacccaacgggtaaagcgtcaacgaaatcacgtatttcgttaccattattcttacacccgcgtcctgatgttgtgctatctgagcgctacacagcagacagctacctacaagagcgtttacgcgagcttggtgttaagtaaagattagctatacccaaaccaccttgaagtggtttgggtatatgagaacaaagcggcatttgagccgctttttttatgccttaaattaatcgaccaagctcattataaaatatgagtttgtaaataattccatgcattattgactatcctaggtataatgcgcgcacttcgccgtatcggctgaattttttaaagagagatagtatgagttttgatgggttaggtttatcaccagctttagtaaatgcagttttagaaaagggctatgaagcaccaacgcctattcaatcacaagctatccctgcgatcattgaaggccgcgatgttatggctgccgcacaaacgggcacaggtaaaactgcgggttttacgctgccgttaattgagcgcttgtcaaaaggccctaaagcgggaggcaataaagtacgagcattggtactggcaccaacccgtgagcttgctttacaagtaagtgaaaatgttgagcaatatgcaaaacattcaaatgtcagctcatttgttgtttatggtggcgttaaaattaacccacaaatgatgcgccttcgtaaaggtgttgatattttagtagcaacaccaggtcgcttgttagacctacataatcaaaatgctgttaagtttgatgatttagaagtgctgatccttgatgaagccgaccgtatgctcgatatgggctttattcatgacatcaaacgtatcattgctaaattgcctgctaaacgtcaaaacttgatgttttcagcgactttctctgatgaaattcgtgaacttgcaaaagggctaattaacgacccagttgaaatttcagtcgcagcaaaaaacaccacagctaaaacggtttcgcagtctgtttatgcggtcgataaaacacgcaaaacagcactacttagtcatttgatccgtagcaatgattggcagcaagtattagtattttgccgtaccaaacatggtgcgaaccgcttagttaagcagcttgaacgcgatgatattgtcggcgctgccattcacgggaataaatcgcaaggcgctcgcgttaaagcgctcgaaggctttaaatcgggtgaagtgcgcgtactagttgcaactgatatcgttgcccgaggccttgatattgttgagctacctcatgttgttaactacgatttaccgaacatttatgaagattacgtacaccgtattggccgtacgggccgagcgggtgcatcgggtcatgctatttcgtttgttacagctgatgatgccgatgatttatatggtattgagcgctttattggtgagcttattccgcgtgcaacagaagctggctttgagccgagtaagccggttgccgaaaagccgctagatacgcgtccaatcaagcctaaaaagccaaagaaaccgaaaaagccaaaagcacaagatggtcaaggcgcagcaaaacctgcacaaaagccaaaacctaaatcgcaaaagcgaccttcacaaggtaaatggcagggtaaagagcagggccaaaaccaaaaaggcagtaataacgctaataaatcgaataacaacaaacccacaggtaataaacctacgggtaatcgtcagcgtgtgtccgggccatctcgaccaagacgtaaacccgctgcggatagttgataacagtaaaaacaaaaaacgcgcaattgcgcgtttttgtttttctaagcgattaaaagagtttaatgcaatagaaggtggcgacaccaataaagagtgtcacggtgacacttaataaagtgcccagcatgacatattcggtgagttgtttttcgctactttcttttaaatcaccaaagcgaaagatagattttgctgccagtagaaagcccacaccgccgtattcacccagcaagataaagctcaacattaatacccgctctagcaagccaataaaatgacccgcggcaggaatactgccttcattgttgatctggatattgattttttctagcatcatgcgaataaacacagagcttgggttaagcaccaataaataagctgcaataacaaacaaggtatcgagggcaatcagcttttgccatgttaagctataaaattcatttttatcggtaagccaaaccgttagcattacaatcacaacaaggtgggctagttggtcgagtataaagggcaccacgcctttatttgaatacgattttgccaagtcaatgacatagtgactcagcataatcgccacagttgctaacaatacccgagagaactcttgccagccgtaggtgtattcccacagtgttagcacagctaaagaggttacgccatgtgttaatacgtgcaagtagagtttgctggcacgaaagtgacggttgtttctatcgtgcacccagctcattggttgccaataaaagtcagcaagtaagtgacccagtactaacgcggtgagtaatagagcaaaactggtcataacaatcctttgagtgtggtttggctgtaattaataaagcgctcgataagttgataatgggctaggttgagtaacttagtgacattctctcggctagtattaagctctttggcaagctctgcatggctgttattttcgacggttaaataataaaacagcgcattggcctgcttttgactcattttttcaagtagtacttcgacaaaagcaatattaagcgcaaaggcttcttcaagggtgttattttcaatattgatcaccaaacgttgctggccgatgttatctaagccgcgacctgataaggtataagcactgcctgtggctgtttttatatcggcgcgggggttgtcgagtgagccaatagccaaactttgtcgtagttcgtaattggctgctttcatttgcaaatacaataagatggcagcatgacacaccagctcaggctctgatagctgtacttgcaacgcatcacctcggtaaatggtgaagcttgcattaaagcgcttggcaacaaagcgtaagctttgatcaagctgatacagcatggcatcgtattcttgttgtggaattttttgtgatttaattaaatcaccactgatcaccgcaatcattatgatcccttagattaagtaacttaatttagttacatcgcgataagtaaccaaatttggttactttgttttatgtaaccaatttaggttactttgttttatgtaaccaatttaggttactttttcgtaaatatcaacctagatatgctacagtgaacacaaatcactaaaaacagaataattatgccagcagttgataagccaagagtcggtatctttgtagatgtacaaaacatttattacacctgtaaagaaagctacaagaaaaactttgattacaatgccttttgggcacagatgagcgaacgctaccaaattgattgtgctattgcgtatgcaatataccgaggtgacgaaaagcaatcgcagtttcaaaatattctgcgcgcaattggttttgaggtaaaactgaaaccttttattcagcgcagagatggtagtgcaaaaggggattgggatgttggcattactattgatatgctagagcatgccaagcagcttgatagaatggtattactttcgggcgatggtgattttgcgttattgcttggtcacttagcgaataattatcagctaccgtgtgatgtctatggagcagagcacctcactgccgatatattaaagcaagccgctgctgagtttcactgtattgatgattcactgttgttatcaagatagaaaaaaatattccattttaaataaaatgtttaactaaagtattatttgcgctaagctaatattagatacaatactgagtatataaaagcacagtaacatggagctttgtcgctaatttgcactcaaaaaagtagcgagaataagttgagaagtgattactggacgtttttttatttattactcacgaataatgctctttagtttcaaagtgttgtaggtaaattttaaactaatgtgcatttttataaaaaaagtaatgacaacgctgtcatttgttgtgtaacattaaatcaacaaaggttgagatcatttcgcattcttagaataaaaataatgcgatttaaataaaaactaaacgaaggctaggggtcgttaaatgatggcgaagagtgtgagtgaggaccaattgtttattggtattgatggtggcggaacaaaatgccgagctactatctactctgttaagcaaggtgtattaggaaccggccttggtggccccgcgaacccattacatggtttagaacgcacgcttgaatcaataatggtctcaacacagttagctcttcgagatgctggattaccacttgagacagttcatcaactgtatgctggtttgggtctggctggtgtaaacctacctagcttgtacgacaagattatggaatgggaccatccatttaaacaaatgtttctcaccaccgatttacatactgcttgtattggtgcacacgaaggtagcgatggtgcggtaattataaccggtacgggctcatgtggattctcttgtgttgcgggtcatacaacaaactatggtggtcatggttttgctcttggtgataagggcagtggtgcatggatggggcttgaagctataaaaaacgcattacttgatttagatggtttgggtgaaaaaacagagttaacagatgtgatttgtcagcatttctcggtggataatgccatggggattgtcgagcaaatgtcagggcagccttcgagtagttttgccaaattagcacgttatgtatttgaagcagcaaaaaataacgaccaagtagcgattgaaattgttaaggaaggagctaattacgtcagtaaattagcacaccgattacttgaaaataaccctccacgtttatctatgattggtggtttagctgaaccattaaactgttggcttgatgaagatatagcgaaacgagttgaagcgccgattcaaccacccgaaatgggcgctgtgtattttgctcagcaatctgtgcttgaacaaaaccaagaggtaagtttgtaatgacgatttatcatgcaagtaaattgtttaccggtgacgaatttttatctgacgtatattttagcgtcgacaatggcgtgtttaagcgtgttgaagcacatgctgatgccgttgaattaacgggtttagtcgcgccaggttttattgatgtacaagtgaatggcggtggtggggcgttttttaacgctgaacaaacaccagattgtttagataaaatagccaaagcacatggtcagtttggttcaacagcgattatgccaacgctgattaccgacaaagtcgaagtcatggcaaaagccgcagatgccactgcacaagcaattgctgaagggatcccgggcgttatgggcgtacacttcgaaggaccgcacctttcattagggaaaaaaggcacccatagcgagcagtttattcgcccaatcacagagcaagaatttgcgatttatgcacgccaagatctaggtattaaaatggttaccttagcgcctgagaatgttagtgctgaagatatcgcgcgcctagttgagtgtggcgtaaaggtatctattggccacactaatgcggattttgcgactaccaatgctgcacttgcagcaggagctgatggattcacccatttatttaatgcgatgtcagcgtttacatcacgagagccgggtgttgttggtgctgcactttgggatgataacagctggtgcggcttaattgttgatggtcatcatgtgcacccttcatcagcaaaattagcaattcgcagcaaacagcgcggaaaaattatgttagtcacagatgcaatgccacctgtgggtactgacgatatggagtttgatttctttgatggtcgtaaagtaattcgtactggcgatcgattaaattcaactactggtgaattagctggcagcgtacttgatatggcaagtgcggtgcgtaacacagtgaacacattggatgttagccttgctgagagcttacgaatggcatcactttatcctgcacaatatttaggtttacataaaaaaggtcgcttgctgagcggttttgatgctgattttgttgtgctagatgataatcaatatgtaaaagcgacatatatagctggtaaagctttgtaagaacttccctggaaaaatccccgccgaagtatcgcggggctttttgtattaaaggtaaacaatgacaacaacacaaccaacaagaaaacgattggcatcgctggatgcactgcgcggcatggatatgttttggatattaggtggacagtcactatttgcagcgctattcgttttaactggctggactggctggaaagtttttgaagcgcacacagtgcatagtgtttggcatggcttcacattttacgatctgattttcccattatttattttcttatcaggtgtggcgatggggctagccccaaaacgcattgaccatttaccgtttgatgagcgcaaagtgtattaccgcaaggcgggtaagcgtcttttgctattgtgcttattaggtattttgtataaccacggctggggcacagggatgccaatggcgttggatgaaattcgttatgtcagtgtgcttggacgtatcgctattgcatggtttttctgtgcaatgttggtttggcacactagtttgcgaacacaaattattactgcaggcgctattttagtggcttattggttactgctttgttttgtgccagtgccgggtggcagtgctggcgacctttcggctgcaggcagttggaatgcatggtttgatgcgcacttactaccgggtattagttatcaaaaccgtgtggtggaccctgagggtgtattgtcgaatataccagcgattgtaaatgcattaatgggcgtgtttgcagggcaattagtggctcgtgctcagcaaattggcgagtggaaaatgaccgcattactgttcgccgcaggggcggtaagtgtatgtttaggttggttatgggatttacagttcccagtcaataaagaactttggaccagctcatttgtgcttgtaaccgttggctggagtgccatattgctcgccgtattttatgcactggtggatattctgccagggcaacgcgccgcgtatccctttgtgatcataggtgcaaactcaattattatttatttagcgtcaagtctagtgaattggggttatgtaagccaaagcgtatttggtggggtggttcgagctgtgccagaggcatggcaacctctgatggcggtgattgcgttattagcagtacaaatgctggtattgcattggatgtatcgccgtaagatctttgttagtgtttgataattattaaacaccaacaaaaagagtaattttttattcacttttactttacaaagataagactaaaagtgataatgacagcgttgtcataatggttttaactactgtaatgtatcctggcagtggttagtctaaaacccaactcgattgcacgtggggttgggttttagagccatttttttcaatttaaataattagagctaatcgatatgcaaatagtaattcttgatgatgcagcccaagttgcagcgtatggtgctaacatctttgctaaacaactattaaaaaaacctgcatcagtactaggccttgcaactggttcaacgccggttgctttatatcaagagctgattgctaaaaataaagctggcgagatttcgtttagccaagcgacaacatttaatttagatgagtatttaggtttaactggcgaacatccacaaagttaccgctactttatgaatgaacagctatttaaccatgtagatatcgacaaacagaacacccatgtaccgccgggtgatgcagtaaatccgcttgttgcttgcactgaatatgaacaaaaaatcacagcagctggtggtgttgatatacagctacttggtattggccgtaatggtcatattggctttaacgaaccttcttcaggtttgacatcacgcacccgtgttaaaacactgacaaaagcgacgattgaagacaatgcgcgattttttgcagaaggcgaatatcaaccgcatttatcaatcactatgggtattggtactattttagaagccaaaaaagtagtgcttttagcaaccggtgcaagtaaagctgatgccattcacgccatggtagaaggcccgttaatggccaaatgcccagcttcggctctgcaacttcataaagatgcggtgatcatcattgataaagctgccgcaagtaaattagaagatttagagttttatcagcatattgaagctgagaaccaaaaactacaagcgcacctcgcgaccttgtaaaattgtgagagagaataaaaaagccctgtttgggctttttttatgcctgtaataaattgggtttatcatcagcttatggtagttttagcgagtaaactattttcaaggaacgccatgctgaattactctcaaatgccattggatcgtgcatcaaatcgccgtaaagatcctaagtggttaaaggctcaaatgaattctcagagtcgctggttattggtcaataacaatcaaagtttatttgttaaagacagtcctgaagtgtgttatttacgcttatctcaagtcgatcacctcgatttatcaaaaggcattttattggggttagacgacgataatgtggctcactttgctttagatgtcagccatgaaccagactcactcattgagcctatgctcaatggcgctgagtttgttgatattcgcaagctaggcccacaagttgagcttaaacaagggtctattgcggcactggcaaggggcttgtgtttttggcacgcaacacaccgtttttgtgggcgttgtggtcatgaaaataatatggttgaagcagggcattcgcgtttatgtgaaaaccaaacttgccagcatcaaacttttccgcgcaccgatcctgccgtgattatgatcgtgactaaaaccttttcagacggagttgagcgctgtttgctaggccgtcaagctagctggccagaaggtgttttttcaacacttgcgggctttgttgacccaggtgaaacactagagcaagccgtggctcgcgaagttatggaagaagctggtgttgcggtgacagatattcaatatatcgcttcacagccttggccatttccatcatcaattatgtttggctttatggccacagcggtttcagaagatattcaggtagataaagacgagttagatgacgcaagatggtttagccgcgctgaacttaatgaatttggccaatggcatgagcagggcagtcatcttaaactaacccgacaagattctatttctcgatttttggttgagcactggcgcaacctgtaaagtacagcttggataaattatgacaaagacaaataaaaatacccaaatcgtctctgcagggcgtaaaaaagcgtacacacaaggggtggtaaaccctgtggtacaacgtgcatcaactgtggtattcgattcagtggctgatttaaaagctgcggcgaagaagcgtggcgacaaaacgttattctatggccgtcgtggtacgacgacacattttgctttgcaagaagcgattgcagaactagaaggcggtgaaggctgtgcgctttacccatcaggtgcggctgcaataagcaatgcgctgttatcgtttgtgaaaacgggcgatcatattttaatggtggatactgcctacgaacctacccgggatttttgtgacaaaatactggctggattagggattgaaacaacctattacccgccgggaattggcgcaggtattagtgagcttattaaagagaacacgcgcgtattgtttttagaatcaccgggctcaatcaccatggaagtgcaagatgtgcctgcaatggttgctaaggcaaatgagcgcggtgttatgactatgttagataacacctggggtaatggcctgcattttagaccgcttgagcatggtgttgatattagtattcaagctgctacaaaatatatcgttggtcactcagatgtgatgatgggggtggcggttgccaataaaaagtattggccaacccttcgagaaaattcatacctacttggtcaatgtacttctgcggatgatgcctatttagcgctacgtggtctacgtactatggctgtgcgtttaaaacagcatgaacaagcagccattgaagtggctaaatggcttgaaacacacccattggttgatcatattcgccatccggcctttgcaacgtgtccgggtcatgagttctttaaacgagactttgatggtagtaatggcttattttcatttgtaatgaagcaaggtaatcaacaagcgattgatgcgtttttagatagcctgcaccattttaaaatgggcttttcttggggtggttatgagagcttagtcacggcaaacctgagcatgaaagggcttcgctcagaaacgggttggtcgcaaggtccagtgataagacttcacattggccttgaagatgtagcagatttactagccgaccttgatcaagcactggctgtgtacgaaagccacctttaggtaaaaggtttatactttgttacataagacccgcttgtcgggtcttttttttctggtaattcaagctgtttcaacttagtgtaattctaataataaaattcattaaggattatgagtgacgcagttacatcctaaacgtcttgcacaaattgcccaatttgagctggtacgactatttttgaccaaacgtggtttgctggcggttgccgcttttgccatttgttggctacttattttacgctatcccattgcccaatctgtgaccttgattagctcatctgattttgctgactttgcaaggcaagcctttggcgccattggcatcagtaaattacttgattggcctgaatctgaactagctgtttattggctgattgctttatttagtttcccaagcttttgtttgtttttatgcagcgaccaaactgtgggcgacagacaacggggtacgttacgctttttatcacttagagccactcgctcagaaattatcataggtcgctttttagggcagctactcattttagcggcactgttatttgttaccttgatggcaaccgttgcgatgcttggctatcgtgagcccagtttgctgctttctggcttaacgcgaagctttatgttgttattttatttgcttgttgcggttatgccatttattgctttgatgagctttttgaatacctttgcgcgttcatcgcgtcttgcatttgtgttggccattttgttctttgccggcggtaatattgtgattggcttactaacatggcaatggcctgcatttgaggttttaaattacatatttccgggctatcaacttgatttaatggcaggtcaacgtgccggcatcacacttgctcttggtttaccacttctacaaacagcagtgttattaattgctggtgaacgaatttttgcgaggagctcattatgaccgttttaattcaagcacaaggcttgtcaaaaaactatggggctaaacgagcgctcgataacgtcagctttgaaataaataaaggggcaccagtggcgctggttggtccaaatggtgcgggtaaaacaaccttattcagcttgttatgtggctatattttaccaagttcaggaaagctatcggtaatggggcataacccaggtagtgcggcgttatttggtaaattaactgcgttaccacaagatgcccagcttgatccccgttttagtattgcgcatcaacttaacttttatggtcaattacaagggctcagtggcgcggttcgtaaaaaagaaacggctcgggttttagagctagttggtttgtcagaagtggctaagcagcgaccggatgacctttctcatggtatgcgtaagcgagtgactattgcacaagctttaattggttcacctgaaatagtgatgcttgatgaagcaacagcgggtcttgacccaatccatgcccgtgaggttcgagagctggtaagctctttaagtaacgaggcaacatttattttaagctcccatgacttaactgagcttgagcgtttatgctcacaagttttacacctagataaaggggtattaagtgagcatcaagcccgttctagcacacaagataacaaacactttattacgctacagttgaatcaacaatatgatgatgtagaagcaaagcttgcaggccttgcccatgtacatcatgtttatatgagccaagcaaaagaatatgtgatcgagtttgaaaaaaccgctgagccttttgatatcaatcttctacacttttgttatcaacaaggttggcagtatcgtcaactggtgaatggtcacacactcgaaaaccaaatttttcataaggagagctagttatgggtctattaagtggattaatgggtaacgcaagtgaagtcgataatgatgatttagaagagctgcttgccaatactctgattgatggtgaaacagttcaaaaagcctataaagtcattcgtgatatgtttatctttaccaataagagattaattattattgataaacaaggtgttactggttctaaagttgaaatgttgagcattgcttactcaaaaattactaagtttagtaaagaaagtgccgggcattttgacttagatgctgaactgaaaatttgggttggttcagatccaacgccaatcagtaaagactttaaagcaggagataacattaatgaggtttacagaattattagtgaattctctttataaggtactgaaattatagactttaaatcataagttggctttgaatagaattattcggccaactttttctttacatttaccgacactttattacaattaatcaagtaaaaacaaacgcttagttaagtttccgttcagttttctcacgttagcatgtgcccaacttagccatcaggctagttttcaacagcaatgaaacaatgttaatagggaaatctgtttatgaaaaagttagcagttattatttcgagtatgcttctgtcaactgccgcgactgctgcggatagttaccaatcaatcagccatttaggatacatggacaccgatggcaacgacacagtaagtgttgattcaacatattacttcgcgccaaagaaaacgatgggtccatacgaccagtttgaatacatcaacaaaacaaccaatgtatttggttcttactctgatgacgactttggtgatgtaactaacatcggcggtgagtacttcgtacaagattttgtaatcggtgcgggttacagcaactacgattacggttcagacactgatttattcaatgtgtctgcaggttacttctttaatcctaaccttcttcttaaagcgacatttatcgacgtagaagacggtgacaacacggtaatgtttgaccttaaatataatcaccagcttaacagcactgattacttaggtttcacattcacagctgacgatgagtttgattaccgtgctgtaaatgcaaaatacttcatggatcttcaacaaggtaactacttaacaattgaaggtactattgctgatacagatgatagcggtagctcttgggaactaggttctaactactacttctctaaagcaacatcagtatttgtaacgtttaacaaagaagatgactacagctttggtgcacagcacttctttaacaaaaacgttggcttaaaagcaggttatgcaaacaactgggatgactcagattacgatgcatacttcgcaaacgtaagcttacagttttaatcattaatttgatgacataaaaaagcccgcattatgcgggctttttcgtttttgttattaccaaccgcactggcggcctttattttgctcatcaaggtatttttgtaacggtgcaaagtaatctaagattgctgttgcatccatttcttctttaccagtgatagtggcaagggcttcttgccatgggcggcttgagcccatttctaacattgcatttagtttttcacccgcctcagcagagttgtaaactgaacagcgatgaatcgcttctttattaccggcaatttcacataaacttctgtggaagtcgaattgtaaaatgtgcgctaagaaataacgtgtataaggcgtgttacccggtacgtgatacttagcacctggatcgaagtctgcttcgctacgtgcgataggcgcttgtacaccttgatatttttcgcgtaactcccaccacgctttgttgtagttctctggcgttacttcacctgagaaaactttccagcgccattggtctactaataaaccaaacgggataaacgctactttgtctaatgccattttcattaataggccgatatctttagattcatcaggcacttcgtctaataaaccaatttctttcaaataacctggtgtcacagaaagagcaatggtgtcaccaatcgcttcgtggaaaccatcgttcgcactttcttgataataaataggttgcgtgttgtacgcgcgttggtagaaattatgacctaactcatgatgaataacagagaactcttcacctgtacgttgaatacacattttaatacgtaggtcgtctttactatctatgttccatgctgatgcatgacactgtacgtcacgatcttgtggtttagtgaataatgagcgctcatagaaggtatctggcaatggtgcaaagcccattgatgtaaagaacttctcggcaccacgtaccattttaagttcgtcgtaatcgtgttcagctaatagttctgtaacgtcataaccaggatctgcattctctggtgctacaacatcgtaaatgttaccccaagtttgtgcccacatattacctagcaggtgtgctgggataggttggtcttgaggtactttatcttcgccatatttttcacctaacttggcacgaacatgacaatgtaatgaatcataaagcggtttaacttgaccccaaatacggtcaagttcttttgcaaaatcatcggctggcatgtcgtatttactacgccacatagcgcctgtatctgcataacctagctcttttgcaccttcattggtcagtgcaacttgttgctcataaagcgggcgcataggttttgaaacttgacgccaaccttgccataaatcaagcaattcattgtaatcacgactcgttgccattttagctgtcatttcgccaagacttagacagctaccatcttctttacagtatttacctttgccataaatgcctcctaactcagccactaattgtgagagcttcgctgttttttcagcatcttgtggtgcaggtaaagtgagcgctagtttaagtttatctagtttacgacgtgcatcataatcaagctctaaactatcgaattttgcagcttcatttgctaggcgtactacggcttcggtcattttgcgatttacttcagcagataattcagcagtatcgtgagtgatgaagttggcataaatccattcagcgcgacttgattctaaatatagtgcgcttaattctttttcagtatcggcgataaatttatcagcatcttgtgctgttacttggcttgatttgacttcagcagttgttgttttagtgctcgtagcgtcgtcattacagccagtaagcgctaatgcacttgcgaccattaatgcgctgatgctcagcttatatggagtcttcatttttattccctagaagtttgttgttttttattgctttagcataatagcagtgtcttactaaaccacaaacagtgcgtactaaaacaactgaagttaccgctgcttacgttgtatttatggcacgatcagtcatacttgagaaaactgacttaaataaaaggattgcacaatgacgaccgtaattattttgctattggttgctgtaattgtgatttttgcagtgaaagacattcgcattaatcttgttacgcggcccacgtttagtatgtttaaaaaagtgttgccacctttatctcaaacagaacgcgaagcgatggaagcgggcgatgtgtggtgggatggtgagttatttagcggtaaccccgattggcaaaaattacacggttttcccaagcctgaattaagtgacaaagagcgcgcatttatgagcgagcaagtcgaaaccttgctagccatgcttgatgattatcaaatcgtgcaaaaagataaagacctaccaaaagaagtctgggattacttaaaaaaagaaggcttttttgctctaattattccagaagagtttggagggaaagagttttcagcaatcgctaactcgacgattgtagcgaaaattgccaccaaaagtttaactgcagcagttacggtaatggtgccaaatagtttaggccccggtgagctgcttttacattacgggactaaagagcaacaagagcgttggttaccaagcttagctaaaggtgatgatgtgccttgttttgcattaacgggccctgaggctgggtctgatgcgggcagtattcctgatactggtgtggtttgtaagggcatgcataacggtgaagaagttattggcttaaaacttaactggtcaaaacgctatatcacccttgcacccattgctacagtacttggtcttgcatttaaaatgtacgacccagatggcttattaggtgataaaaaagagctcggtattacttgtgcactcattcctacagaccatgaaggtgtgcaaactggcgagcgtcattatccactgaacatggcatttatgaatggtactacgtacggtaaagatgtatttataccacttgattggattattggtggtgaaaagggggctggtagaggttggcgtatgctagttgaatgtttaagtgcaggccgtggtatttcgttaccggcacttagcaccgcaacaggtcatttagcgtcaagaatgacatcggcttatgcaacagtgcgtcggcagtttggtgtttcgattggtcaatttgaaggtgtgcaagaggcactcgcacgtattggtggcttgacctacatgctagagtcagcaaggttaatgactgctggagcgattgatttaaaactgagcccttcggttgttactgcaatagctaaatatcatatgactgaaatggggcgtacggtgatgaatgatgccatggatattcattcaggcaagggaattcaagtgggccctaataactatttagcccatggttatatggggatccccgtgtcaattaccgttgaaggtgcaaacattttaactcgtaacttgatgatatttggtcaaggtgcgactcgctgtcatccgtttgttttaaaagaaatggaagcagccgcaatggaagatcatgatgttgcattgaaagaatttgactcgttactgcttcaacacattctatttgctgcaagcaatgcaggcatggcatttgtacatgctttaactcgcagttattttgcaaaagcgccggtgtgtggggcaacctcggtgtattacaaacaattaagccgtatgagtcgtggcttagcgttttgtacagatgtcgccatgctagtgttagggggcgagttaaaacgtaaagagatgatctcggcgcgtctaggcgacgtgcttagccatttgtatcttgcatcatgtgttttgaagcgctatgaagacgaagggcgtcaacaagcagatttaccttttgtaaaatacgcggttgagcattcgctattttgtattggccaagcattcgatggtttctttaagaacttctctaaccctgtggtcaatttcttattaaaacgcattgtgttccctgtgggaaatcattatcaccgtcctagtgatgatattgctcagactatttgtgagcatatgagtaaaccaggcgtcttcagagacagactcacacacctttgttatgttgatgaaaatgcaggcaccggggtaatggaaaatgcgtttatcgcgatgattgatacccatgaagattttaaacaattacgcaaatggcaaaaagaaggcacgattggtcgtcacttagaattggaagatgcgatagctgctgctgcagataaaaacctcataaacgaaaccgtagctacacgaatgaatgaggcgaactcgcttcgcaagcaggcaatagcagtagataactttgcgcctggggagttgtagtatagtagatatcaatgaaagccttgctagtgtaaggctttcattttcatactcttagtgaagaccattacgtataatgttttctgcttcactgaccggcatagggcgggccttgagaaaaccttggccaaacttacactgagtttgttttaaaatagcaagttgctgattcgtttcaataccctcggctacaacatctaattgtagagattgtgctaaggataaaatcgcatctactaatgggttttgtcctttacttaagtgatcaatgaagcttttatctatttttaaaatgtggattggtagttgatgcaaatacccaagtgcagaataaccagtgccaaagtcatctagacataatttaacttctagcggcgataatccctcaataattttagtcgcaagctctaaatttccaatcaagccagattctgtgatctcaatgcaaagcgagcctaaaggtaattgatgctttgcgtataatgcgtgtatttgcgaaacaaagtctaaacttgcaaagtgtcgtgaggaaacattaacagtgactctaccaaatgataggccttgttttgtccagttggctatttgttgcgcagctaaatctagaagatgtaaatctagattgattatttgaccagtatcttctgcaacaggaataaagtctgcaggagagacaaaacctttggttggatgatgccagcgaacaagtgcctcaaaaccaacaacctgtgtatcttgaattgtgaatatgggctggtaataaagctcaaactcattatgctcaatgccatgttgtaagtcgttttcaatgtcggcatgattttttaactttttgcgcatggtattgttaaataacttaacttgcccacggcctgacgacttggcttcatacatagctgcatcggcatgttgcaaaagtttataagccttatcattagtgctttcacagaatgctacgccaatactggttgatgcttgtaataaatggccatcaatattcagtggttttgctaaagctgccttaatacgctcaagagcatcttgaacttgttgtttatctgttatgttttccatgaaaatggcaaattcatctccacctaatctagcaaatgtatctgtatttcggatcgtactttgtatgagctcgcagatttttactaaaaaatgatctcccacttcatggccgagtgagtcattgatgctcttaaaacgatcaaaatctaaatagagtagagcatggtgtgtgcctttatttgcgcgtgctaagcgcaaaataccatgttttattcgttcgatgaggagcgatctatttgccagtccggtaagttcgtcatgtaatgcacgatgttctagctcctgacgtgataactgcctgtcgattgccatactgatttggcggctgacataagtaagtaaagcacggtcatgttcattatagtggtagtgtttactgtaactttgaactgcaatgactccacttattcgatcatttactttaaatggcacaccaagccaagactctgcttgtcgaccaaccattttaaaatgacccgcatcaatatgttgttgaaacgcctctttattaaacaacagtgatttatcgatttttaaaaggtagtaagaggccgtatcttttaagagttctttagaaattttagtatgtgcattagaacggacaccttcttcgataatataaactaaatctaaaacatcactttgtttatcatatagcccaatgaaaaagttatctgctctgagtaacgaggtgataatgctatgtaaagactcaaaaaagctatcgagttcacttgactgataagtaaggttggcgatttgcaacatgcaattttccaacttttgagcatcgttcaattgttttactgtttgctgaaggttttctacagttctgacttgatttaactttgcactgagtaaatgtgcgactgtagataaaatttctaaatgggcgtcattaaaatagtttttttgcgggtgctcgcaatcaataacacctaataccttttctttatatactaaaggaacacagagttcagaaagtgcagggcgggcatcggcaatatagcgttcgtcttttgttacatcaccaatcattaacggtttaccggttgaagcgacatacccagtaataccttgctcaaaactaatttcggtgcgcacaatatggtatgtatcgtctgcgagagtggttcccatagacgcaacttctcttaatgtacgagactcatcatcgactaaaaatatgacacattctataaatccaagcctgcttactacttgcgaagtcacatactctaataattcttcaacagtatctaattgcattagcgatgaagagaattgattaataatatggagttggtcagttttgacctcaagtgcaaacgctgtatctaaattcttagacatagaaagaaaagtaacccaaatgttttattaacttattacgttaacctactatcaaactatctacaaagttattttcaaaaaaaacagcaactggtgtaaactaggcatctgaacacaaacttcaaaaaataacttcgttatttgtataaagtttgcgctatccctctaactttagccgtggaaaccagcaatgtcagatataaataagattgaaacactaacaattacccgcccagacgattggcatattcatttacgtgacggtgatcagctaaccgatactgtacgtgatgcaagccgctatatggggcgcgcgattattatgccaaaccttgttccaccggccacatgcactgacagtgctttatcatattatgagcgaattaaagccgcaggccctcagggggattttgagcctttgatggtgctttatttaacggacaaaacctcaccagaagaaatcaaaaaagcaaaagcaacgggtaaaattgttgcggcaaaattatacccagccggtgcaacgaccaactcagattcgggtgtcacatcaatcaaaaacatttacccagtacttgaggcaatgcaagaagtagggatgttgctgctagtgcatggtgaagtgacagattcatcaattgatatctttgaccgtgaaaaagttttcctcgatacaattttagccgatgtagtaactgacttccctaaacttaaaatagtacttgagcatattacgactaaagatgccgtagagtttgttaataacgcacctgataatgtagcggcgacaatcacagctcaccacttactttataaccgtaaccacatgctagcgggcggtattcgtccacattattattgtttaccaattttaaaacgtaatattcatcagcaagcattgattgctgcagcgacaagcggtagcaaaaagtttttcttaggcacagattctgcgcctcattataaagataaaaaagaagctgcgtgtggctgtgcaggtgcttacacagcacatgcagcgattgaattatatgctgaagcatttgaagaggcgggagccttagataagcttgaaggttttgcgagccattttggccctgacttctacggtttagagcgtaataaagacacgatcacactggtaagagaaagctggactgttcctgcaagttacaaactaggagactctgaggtagtgccgatcaaagctgaagctaacatggattggcaagttaagtaagcgagcttactgttagctaatattattcagaagcccaacattacgttgggcttttttattattttttaattgtttagaaatatgcctgtcatatttaaaagtttagccgttgacctcaaaataattttcgattaatagagctaaaagctatttaatgtgttagtcttaaattgctttgagtttttgcgtatagaatttacggataatgtgcggcttgttcggttaccggttggttattggttcttcctgtactttaccccctagtttttgggcattcactcagggaggatagagccattatggctgaattttaataattgacttacaggaaaatttggtatgtcaaacacggttactggtaaagttaagttcttcaacgaagcaaaaggcttcggttttattgaacaagaaaatggtcctgacgtatttgtacacttcagtgctatcacaggtacaggcttccgcactttaagcgaaggtcaacaagtatctttcggcatcaaacaaggtcaaaaaggccctgaagctgagaacgtagaagtagcataattcgttatgcgaaactaagtattttggtgaaacagtttctgtttcaccaaaattcatttatacctattatcaactatctctacctcattcatactacgctttctcctaaaccattttttctacttcttatataaataatccctttgtacctcatacttggtagtctgtaccgaattattaatcccccaaaggcattgtctcgggtttttttagtcagacattaagctaaaagttcgattacaatcctctaaaagctactctccataactaaagtattatatgcttcatagacgggatttactcaatgcaacattgactgttgtattggctagtagttttgatcaacaggttaagttacctcttttttatagtgtttgagatattttcaacaatctcaaaattacccgctaaacttaaagtattcacaagtggaataaattctgagtaacttatacttgtttgatgaaatataatgaaggttcgctaatcgatgagcataggaaacaatatacttttggtagacgaccacccaatggttgcaacagcaatcaagatggtactatcaaagtcaactctggttaatgaagtaaaagctgttgcgagtcaaaaggaagcattacagtttttaaaaagtaataatgtcgcgctagctattttagatatcgaattagaagattcagatggctttagtttatacaaacgcgcagttagcagtggcttctctggtaaagtgctatttttatcagcaaagcaagataaacacattattcgaacagcggctaaattaggcgcgcaaggttttgttaacaaggctgaaagcttagaggatatttcatctgcagtagagatgattttaaggggttataccttctttcctcaagagcatttaatagcatctgaaaaagatattgatgaattactgacagagcgagagcttgcagtgatgaattacttgctacagggcctctcaaacaaagatatcggtgaaaagctgtttattagtaacaaaacagtaagtacgtacaagacaaaaatctttgaaaagcttgaggttgattcaattatctctttagcaaagcttgttaaagaccgcgccatattttgagactctcacccttagcggtgagagataaattctcgctcatccttgtgtttagtaaggcaattgtgcatttactaaacattacctactgatgagtgcataaaaattctgcaaattagattttttagatcactaaatagaatttttttttaaattttcttatgccttttctggttttattaaatgttacatttatgtttaaggttgaacccagcatgaacgtggtgtttgctagtaaagggctttagaaccttccccttgatgggtctgttatatttttgttaattgattgttcgagctattttcctatcaacgacgagttaccaaatttttcggacgaaagccgaacatcaagttgacagactctgatgcatttagcattattggagggttgatatctattaaaagatatcagggttgtcttcttcggaaggtaattaaattataaaagtaacattacttaattggttgggaactatgtctgttaaaatcagaaagagtcttgtagcatcagcgttggttggcgcttttgcatttgcaagcagcaatgtgattgcagatcctttgaaagatgtgcaagatgcaggtcaacaaattcaaaaggctgctgttaagtctcaaactaaaattgacaatgtatatggtcaaactcaggagctaatcgctgagtaccgtagcgttgttgacgaaactgagctaatgaaggtgtataatgatcacgtagcacgtttggtcgctgaccaaaacgcgtctatcgaatcgtttgaccgtcaaatcgcaacaatcgataacacgaaacaaaacgttgtgcctttgatgtatcgcatgatcgatacgcttgagcaattcatcaaagcggacgttccgttcaatcttgaaaaccgcctagcacgtgttgaaagactacgtgacatcatggcatcagcttcagttactacatctgaaaaattccgccaagttcttgaagcttacactgttgaaactgcatacagctcagctgttacagcttcacaaggtacgcttgaagttgatggcaaaaacatcaacgtagacttcggtcgtttaggtcgtatcacttacgtagcacagtcttttgaccttaagcacgcgtgggtgtgggataacaacactaaacagtggaaagaattaggtgaagaatacctaaaacctgttaaagaagttatccgtatggcgcgtaaacaagcgacattagaacttgttaaactaccaatctttggcgcggagtaatcaataatgaagaaactatttaaaggttttgctgttgcagcagtactatctgtttctgcaggtaccgcgcttaatgcacacgcaaacactgatgctttagacaaaattcttgagcaagttaagcaagaacgtatttctgaaggtaaattaaacaagcaacgtgaacaagagttcctttcagctcgtgctgacaagcaagcgttacttaacaaagcaaaaagcgatctagctgctgaaaaagcacgtggtgaccgtttatctaaagaatacgcacaaaacgaaaatactttagctgagaaagagcaagctcttttaaatgctcaaggtacgttaggtgagatgttcggtgttgtacgtcgtgcagctgctgatgcaatcggttcaatcgaagcatcacttgtttctgctgaaaaaccaggacgtgctgaagtacttcgctcactagctgctgcgaaagagcttccaactgtacgtgaacttgaagaactttggatttctcttcaaactgaaatgactgaatcagctaaagtttcaactttcgaaactgaagttgcaggtcttgacggttcatcttcaatgaagaaagtaacgcgtattggtaacttcaacttagttactgacgaaggttacttaatctactctccagaaactaaagcgatccaacctctaggtaagcaacctgatagctacatcctagcgggtatcagcgatttagaaaaaacttctgcagataactacgctggcgtatacatcgacccgactcgcggcgcgatcttacgtatcaacacgcagaagaaatcgttaatggaatactacgagcaaggtgctgaagtaggttacatcatcacagtattacttgttgttggtctacttatcttcatcgttcgtttcattgatcttgcgcttactagcactaagattaagagccagcttaaaaacctttctactccgaatacaaacaacccactgggtcgtattcttaaggtttacgctgacaacaagaatcaagacgttgaaaaccttgagcttaaacttgacgaagcaattctacgtgaaacgcctcgcatcgaagctggtatcaacatcatcaagatcttggcagcaatcgctccattactaggtctactaggtacggttatcggtatgatcctaacgttccaaacaatcacattgttcggtacaggtgatccgaagatcatggctggtaacatctctctagcacttgttactactgcgctaggtctaattgcagctctaccacttatcctacttcactcaattgttgcgggtcgtagtaagtcggttttacatgtccttgatgagcaaagcgctggtattatcgctgctcacgcggagaaggagaaagcctaatgctagtcctgatggagatctgggaatctatcagggattttgttggcacaggcggccaggttttatacgtggtcgcgatagcactctttcttatgtgggttttaatgattgagcgctattggttcctactagctgagtttcctcgtatgacgaaggatatcgtagctcagtgggatgcccgccaagacactacgtcttggtacgcacacagaatccgtgaagcatggatttctgaagcgtctgaaaaattagatcagcgtatgttgttgattaagacattagtagctgtttgtcctttaatcggcttactaggtactgtaacgggtatgatcgcggttttcgaaaccatggctactcaaggtactggtaacgcacgtttaatggcatcaggtatttcaatggcaacaatcccaacaatggctggaatggttgcggcactatctggagtattctttagctcacgccttgaagcaagagcgagaatggcgaaagctaaacttgtagatagcatgcctcatcactagagagagaattaaatatggcacgtaaacaacgttttcgtgaagaagaagaagcagcggttgacatgacgccaatgcttgacatcgtatttatcatgcttattttctttatcgtaactacatcgttcgttaaagaggctggtatcgaagtcaataaacctaaagcagctgcagctacgaagcaaaaaaatgcaaacatttttgttgctatccgtgctgacggtgcaatctggattgataaacaacaagtagacgttgagcgtgtatcagctaaacttgaaagtttattagcagaacaacctactgaagttgtaattttgcaagctgataaagaagcaaaacacggcgtagtagttaaagttatggaccagatcaaagcgacgggtgataaccttaaaatttcaatagctggagatcagtaatgattcgttttctgttttcactgattgcaggtggggcagttactttcggcttgttctacttcatggcgtacctcatctccggtggagctgatcgtgcgactgaacaaaaagaacagattgtagtcgaaattatgacgaatccgcctgaatctaaggtgcaggagaggaagcgtgttccgcctccgcctccgccaccgccaaagcagccgcctaaaccgcagccgcctcagccggaaaacagcaacccaaatactggtggtttgtcatttaatatgccaagcatcgatgtgggaagcacagctggtggcctaagtggtcctggtgcatttggacgtgatggtgatgctacacctatcgttcgtattgaaccaaaatacccaacgcaagcagcgcgtgatggtaaagaaggttgggttcaactttcattcactatcaacgaagtaggtggtgtagaagatatcgaagtgatcgatgcagatcctaaacgtatcttcgaccgcgaagctaagcgagcgttatctaagtggaaataccgtccaaaagttattgatggtaagccacaaaagcaatttggtcttcaagtacaactagactttaaacttaatcaaggcaactaaggaggcgagtaatgagaaatttatctaaagtaactgctcttgcgcttcttatgtcactttcgggtgtggtatttactgcacctgctttagcggcgccagactacgcgaaaattgaagagcgtaaaaaagcaaaaactaaagttatgggtgagcgcgttggtaagaaagtaattaaagcgtttgacttgtacaatgaagaaaagcttgacgaagccattgcattgcttaaagaaattgatgcatcggatgacttcgacagagcaactgttgaccgttatttaggtcaaatgtacgctcaaaaagagcagtaccagttagctatcaagcacattcaagcagctgttaaacctgatgttttaaactttgcagaccaagagcaaggcctaaaactattaggtgacatgtacgcaggtacagagcaatatgcaaaagcaaaagaagcttatgcagcttggatggacttcacaggtgaggaagacgacaaagtttatacacgtattgcacaagcaaactacgagttaaaactttataaagacgtacttcctgctgcaaacaaagcaatcgaattggcaaaagagcctgctaaagcctcttaccaattaaagcttgctgcctattttgaacttaaacagtacaaaaacatggtagaagtagctgaagagattgttcgtgtttggcctgaagacaaaaaagcctgggttggtttgggtaaatattacctacaaaccgaagacttcaagaaaggtcttgcgaccatggaagttgcctataaaaatggctattttgaaaatgaagttgaatacaaagtactttctaacttctattcgttaaacgatattccttacaaagcagcagttgtgcttgaaaaggcaattaacgaaaataaagttaagcgtaataagcaaaatatcagtgcagtggcatctaactaccaccgctcaaaagatattgataaagcagctaaatactatgaagaagcggctaaatttgatgacgatgcagagctttaccgcaaagctggttcattacttttacaatcgcaaaactatagtgcagccgttgttcgtttgaacaaggcattagagttaggttctgataaaaaaggaactatctactctgacctagctgaagcttattactaccaagagaagtacaagcaagcttataacgctatcactaaagcaatggacgatccgcgtacgcgtaaattcgcgaagagctggtcaaccttcatcaaagataaagcgaaccgtaatggcgtgaaaatctaattgatgttgttttaaattaaaaagcccctctggggctttttttatggaattttataatgctaagacagatcgtatttttacttgtcgcaagtgtgatgataacagcttgctcagagcaacctcctcgtttcaatcactttgatgaaggccagcaagcactcagtaacataaataacttactatctaatcaatcaagctcagattcggtaacaagttggcctttttcgaacgagtatttacaagctcgtcacctcaattatcaaggcttgaaaagtatcgcgctagatgaatcgcaacaggcgcaattaaattacctgatcatcgctgagcgttatccagaacgttattttgtttggccagagcagcgcgatgttgttagtcgtgctattaataaaaaagattattctgctcaaaaattagctacgtggttggaattagtacaaacacaattaatgcaagcagaggaaagtagtttaaaactaaataaaattgagcttaagttgttacattcaatggtgcaaaaccacctaaataataatgatgatgaagtggtacactcagcactttcaaagcttgaacaatatttatctcaatacacaccacgtagcaagttaggtttagtggggcttgcaaatggtaaagattggtaccagagcaagttgaattactttggagcgaaaacgcaacctcctctgacgtggctgagcaatattcagtctcaattaaagcaaatagcgatacacaatgtggcgtttcatttaccgacgtcacacagtactcctctagtgatgcagttttttagtcaagatgagaatatggcgggtcttgactggcagctagaatatcgagaccctttacaaagtaagcgcgagttatcagcgggcgagcagtatttttggttagtgatgatggaaacagatcttggtattcattatcacacttggagtgaacagcaagcgcgagtaaatctaataaagcgtttgggggtgacgaaacaagaagctgattggcttatcgaagatattatactttatcctgcaacgagctttatattttcttcataataccttgctgcgctctaaggagcgcagcttctacagcgttggctagcagggtctgctaataagcgttcatcatcaattttttcttcgcaatcacaacaatagccatattgcccaatgtctatttggcataacgccgcctctagcttttcgagtctagaaattaaaatttgatattcaggacccagcttatttgaggttaattctagccaatctgcaggaggggtttcgcttaactgcgaaagcaattgttggtgatagccttgatcagaattagttagcatatcgagtaaacgttgtctaacctgcgcaagttctgcagataactttgtttgaatttcagtattgttcatcgcgtttattccaagtgggcaatactgacattatcaaacaaaacaagttagctagttatgatttgcatcaatactcggcgctttggcatactttctaagtacatctgcaacttcatttttggcttttaaacgcctaatctcatcaaaaagtgcgttggcctgtgggtactggcgttttaggtatccaagccactgcttggttcgagaagcaaaatatttctcacacttgctttcatcttgatgcatagaagagtgaataatatggtaaatcacatgctcccaaagcatcggagtgtactgctcattttcgacatgtgcttttatttgctttgctaaatcaggcattgctagagcaccacgaccaagcattaagtcttggcaatgactgcgtttttgacacagcaatgcatcttcaacttgccaaatttcaccattagcaaccacagcaatgtttttatttttgattaacggagggatcttttcccaatatgctggtggattatatccatctcttttcgttcttgcatgaatagcgatacttgatgcacccgcactgacaacagcatcaacaatttcttggctgttgctatcgtcatcaaaccctagtctgatttttgcactgacctcatgacgtggatcaaccgcatcacgtacggctttgattatttcgtacatgtgctcaggatctttcaaaagtacagcaccacctttacttttattaacagtttttgctgggcagccaaaatttaagtcgataccatgagatcctaagcgtattgccttgactgcattttcagccaatgcattaggaacttggcctagtaattgaatccgcactggtgttccagcacgggtataaccaccggcttttaattcagggcaataacgatgaaatacacgctcgggtagtgtgtcttcaacgacacgaacaaactctgtaacgcataaatcaaatccacctaaatcagtgagtagctgtctcattttgaaatcgacaactccctccattggtgctaaaactagtcgcatgatacctgtatacttaataaaaattggacgcgtattctacctgctattctatatttgataaatcgtaatttgctttatcatcggtttcagaaaataatttagtaattttgaaagtaattttcagttcgcaggtcttgtttaataaccctttataaaaaagagagtcgataatgaacacagttaagaaaaattcaattgcattaacattaggtgcggttgtagttggtgcgtcaagttttgcagccactgatgctaacgctaacccatttgaatttcagcaaatgcaagctggttatcagctagatgccgctgaaggtaaatgtggcgaaggtaaatgtggcgaaggtaagtgtggtggcgataaaaaagctgaaaaagaaggtaagtgcggcgaaggtaaatgcggcggcgacaaaaaagcagctaaagaaggcaagtgcggcgaaggtaaatgcggcgcagataaaaaagcagctaaagaaggtaagtgcggcgaaggtaaatgcggtgcagataaaaaagcagctaaagaaggtaagtgcggcgaaggtaaatgcggtgcagacaaaaaagcagctaaagaaggtaagtgcggcgaaggtaaatgcggtgcagacaaaaaagcagctaaagaaggtaagtgcggcgaaggtaaatgtggcgcagacaaaaaagcagctaaagaaggtaagtgtggcgaaggtaaatgtggctctaaccactaagcgctcatttagcttttaaaagggccgtaaaggccctttttagtaggaggtagtatgttaaaagaatcagtagctgattttgggcaggttggtttaggtttgcgccgagaaatgcttgatgaaatgctcattgatgttccaaaacccattgagtttttagaagttgcaccagaaaattggctcaagctaggcgggcgttttggtaaacaatttaaacagcttaccgaacaacatgcctttgtatgccatggtttatcgttatcaattggctcacctgcagcacttgatattgactttgtgcaatcgctaaaagctttctttaaagagcataatattcgtttattcagcgaacacttaagctactgctcgggcgaagggcacatgtacgatttgatgcctattccgtttactgaagatgcaattaagcatgtctcctcgcggatcagacaagtacaagatattcttgaacagccaattgctattgaaaatgtatcttactacggtgcccctgggcagcaaatgactgaacttgagtttactaatgcagttttagaggaagctgattgccaactattgcttgatgtaaacaatatctatgtaaactctattaatcatggttatgatgctgagcaattcttagcagcattaccaactaaacgtatcgcttatgggcatgttgcgggccattacactgaggctgaagatttactcgttgatacccatggtgcgccagttatcgatcctgtttggcaattgcttgaaaaagcctacgcagtacatggagtttttcctactttgttagagcgtgactttaatattccacctatggctgagttattagctgagctgaaaactattgaagccttgcagcacgcagccaataagcaaaaccaagtaacggtgaaacacagtgcataatcattttacgcaagtacaacaagcgtttatggcgcatattcgtgaccctgagaataatgctaagcctagtgatgttgaagagcgtcgcatggcgatttaccgcgatttattttttaataatgtggatggttttgtcagctctgcatatccagtacttaaaagtttatattcagagcaagcttggcacagactcgttaggcaatttttcagtcagcacaactgtaaatctccttattttttagatatagcaggggagtttttggcctttcttgctaatgactatgaaatgcaaagtaatgatcctgcgttcatgttagagctggctcattatgagtgggttgagctcgatgtgtcggttgctaaaatacttgcaagtgaagttggcttatcggctcatcaagtgacaagttccccattatatttaagttcactggctcgtaatttgagttatagcttcccagttcataccatcagtgtcgataaccagccgagtgagcccgcagctgaggcaagctattttgtggtatatcgggatggcgatgacgaagtgcagtttttatcaacaaacgcgatgactgcattactacttaatattattgaatctcagccaggtataaacttaaatgatgtatgccaagtagttgcagagcatgctcctcaatttagccaagagcagctttatcagggagcgctcaataccttaagtgccatggcagagcgtggtatcgtagttactaatacattggtttaaaaatcggctaaacccctttattgatgagggcagttcgactattatgtccgccttattttgtcgtgcttaaataaaggtagtaactatgtcgaatgataaagactttaaagatccgttcaatgcaacttatttcattgcgtttttagctgtattcggtggcattggctgtcttaacgctattctgggttggatcacatctttatcttaatctgcgaaagcaaatttaagacactaggctgcaccatgcagccttttttgttgtagttaggtgattaatttcgaaacttgctaccgactttccactaaggtgatgttatactctcgagctttgttagataaactttttgagcagtataattatgactcaagcaacttcaacgctcatcaaacagagcattgcaacgatcgctgattaccctaagccgggcattatgttccgcgatgtaacaactttaatggctaacgctgaggcatttaaagcaacgatagacagctttattgcggcatataaagaccaaggttttactaaaatcattggtactgaatctcgtggttttatttttggtgcgccactttcttatgctcttggtattccatttattccagttcgtaaaccaggcaagcttcctcgcgaagtgatttcacaaaactaccaattagaatatggtgaagatacgctagaacttcatacagacgctatcgtttctggtgataaagtgttattagtagatgacttacttgccacaggtggcacaattgaagcaacagcaaaattagttgcaaaactgggtggtaatgcaacggatgccgcatttgttgtatctttacctgagcttggtggtgaacaacgtgttgctgatatgggcatcaaaatcttaaagttggttgaattcgaaggcgaataattaatgagttatcaggttctagcaaggaaatggcgaccacaaacctttcacgagttagtggggcagtctcatgttaaacaggcattggttaatgcattaacacaaaatagactccatcatgcctatctctttactggaactcgtggggtgggtaaaacaaccatcgcacgaatattcgcaaaaagcctcaactgcgataagggtatctctgctgagccgtgcggccaatgttcaagctgtactgacattgaagctggtcgttatattgatttgttagaaatcgatgcggcatcacgtaccaaagtagaagatacccgcgaaatccttgataacgttcaatacgcgccaacacgtggtcgttacaaggtatacctaatcgacgaagttcacatgctatcaaagcatagtttcaatgcattactaaaaacattggaagagccaccagagcatgtgaagtttttattagcgacaaccgatccgcaaaaactgcccgtgacgattttatcgcgttgcttacagtttaatttaaatgctttgtcgcaatcagaaattcatgatcagcttgcccatgttcttaatcaagaacagctaagttttgatgataaatcgctgtcaattttagcgaaagcagctgatggtagtatgcgtgacgcactgagtcttacagaccaagcaattgcgcaaaccaatggcaatattaatcatcaggctgtgcaaaccatgcttggcttaatggatacccaatatagccaaaccatgttagcagcgttactgtgccaagatggcgatgcattacttcaagaagtaaaagcagtggttagccgaaaccctaactttgtagccttgctcgacgatttaatcgccctgacgcaccttattcagcttgtgcagctcgtgcctagtgctgcggcacttgatgagactaaccgtgaatttattgagcaggtggcacaaacaactgatgcacagcaaatgcaggtgtattaccagttgctattaaatggtaaaaaggatttgcaatgggcacccgatgctaaacttggttttgaaatgatcatgttgcgactgctcgcatttcaaccaacgcaatttgcacaaaatcaaacacccacgaatacccagcagcaggttaaaccaagtggtgccggagcactacgtgatattttaaaaaaatcaacggcgcaacgtgagcaagcagcttcagagcaagcatcagtagcacaaagttcagtgcatacaacttctgtgccttcagagcctcagccaacacaagttgaagctgagcctattcaagcagccaaagcagaaacagcacatagccatgagcctgcccagcaagttgaagcaacagcagtagagcagcctaatgctaatcaacagtctcagcaatccgctcagccagctgaaactgaagtcaaaccagcgccacaacagcagagtagttcagagcacattccagcagctgattattcttcaccagagtactctacatctgactattcttcgcaagactatatggatgagtacgatgcacaaatggattcatcacttgctgcgcaatatgatgatgtgatgaatagcgcttatgatcagggctttagcgcaaatgaagcacctgcgcctcagcaacaacaaactgcacccgcacaattgcaacaacagcaaagtcaggcgcaatcggccattgctcgtattttacaagaccgcaatatctcaggtgctggtcgcttaagtggtgcggcaacgcaaacgaatgttaaagcagaacaacagcctgaagctaagccaacattagaaccgccagcgcaacaaagcacagccacgaccaatactcagcctcagcagcaagcaatggctgctgaagtaaaaaagcccatcccccagcaaacgggggagagcagcaataaagtaaaaaaagtcgattttcgagaaaagcatcaaacaatcactgaaaacctagcgcctgaattgcttgagcaaattaacccgcaaaaagcgccagagccagtagctgaagaagccagtattccggttccagatgattttgaaagcccgatcagcagtattaaatttgcacacgaacaagacgagtgggcgtatttaataaagcgtatgggacttggtggccgcatgcgccaatttgcgctgcattcgatctttactaagcagaataatcagttacatattgaagttgactcatcacagcgccacttagacagcgcagtgcttagacaaaagctcaatgctgcattaagtgaaatttatggtcataatgtagagcttagtatcgagtttgctgatggcgtaattgattcaccgtatttgattcaacaaaaaattgatgcgggtcgtcatcaacaagcgattgatgtaataaatagcgatgaaaatatagtgcaatttcaacagttatttagcgctataatcgatgaaaacagtattcaggcattgtaattagttgcaatagcccttatcttcatgccaattaaagtagtttagaaagagagacagttatgtttaaaggtggaatgggtaacatgatgaagcaagcgcagcaaatgcaagagcgcatgcaaaaagcccaagaagaaatcgcaaaccttgaagttgtaggtgaagcaggtgcaggcctagttaaagtaactatgcttggtaaccacaatgtacgtcgtgttgaattagatgaaagcctaatggaagacgacaaagacatgatcgaagatttactagcggcagcgtgtaacgatgcagtacgtcgtgttgcagaagaaacacaagagcgcatgagtaaagtaactggcggtatgcaattaccaccaggtatgaaaatgccattctaagtgatcttgtatgcaactatctcctagtttaacacaactaattgaagcgctaagatgccagccgggcataggcccaaagtcggcacagcgtatcgcttttcatttgcttgagcgtgaccgtcaaggtggtaagcaacttggccatgcattaaccaaagcaatggatgaagtagggcattgtcaatcttgtcgcactttcacagagcaagctgtgtgcgatatttgttcaagtgttaaacgccaagatagtggtttactgtgtgtggttgaatcaccaaccgacgtactcgctattgagcaaactggtcaatatcaagggctttactttgttttaatgggtcacttgtcgccaattgatggtataggaccaaaagaaattggccttgatatccttgaaagcaagttgcaacaaggcggtattaatgaggtgatcctcgcaaccaatccaagtgttgaaggtgaaaccactgctcactacattgctgagctttgtcataagtatcaggtaggcgcatctcgtattgcgcacggtgtccctgttggtggtgagctagacttacttgatggtatgacgctgatgcacgcatttagcggacgacgcgccgtaaatcaaaactaatacctgatatggtatcaaaagcctgctttatgcaggcttttttgtagttagccccgaatttacccgctaatttaattttttgccttgaagttccaaaagcctaccccatatatgagtcatagtgcagattagacactttgttaattggagatttacacaatgactgcagcacaaaaagaaacattaggctttcaaacagaagtcaaacaactattaaacctgatgattcattctctttattctaataaagagatattcctacgtgagctggtatcaaacgcgtcagatgcagcagataaattacgtttcctagcgctttctaatggcgatttatacgaaaacgatgcagatctaaaagtacgtattagtgccgataaagaagcaaacacggtaaccattactgataacggtattggtatgagccgtgaagatgtgatcaattcactgggtaccattgcaaaatcaggcaccgcagaatttttccaaaacctaacaggcgaccaaagcaaagattcacaattgattggtcaatttggtgttggtttttactctgcatttatcgttgcagataacgtaaccgtgcgtactcgtaaagcaggtgaaagccaaggtattgaatggcaatctgcaggtgagggcgagtacacattacaagagattgacaagccaacacgcggtaccgaaatcattctacacttacgtgaagatgagaaagaatttgctgatgagtaccgtttacgtagcatcgtaactaaatactcagaccatatttctattccagttgaaatgtataaagcagaagtacctgaatctgaaggtcctgatggtgagaaaatcccagcgcagccgggcgagtgggaaggtattaaccgcgcaactgcactttggactcgcgataagtcagaagtaacagatgaagagtacaaagagttttataagcacattggtcatgactgggaagagccactaagctgggctcacaacaaggttgaaggtaaaactgaatacacaagcttgttatacatcccgaaaaaagcaccattcgatttatggaatcgtgaccgtcaaactggtttaaaactgtatgtacaacgcgttttcatcatggatgacgcagagcagtttatgccaagttacttacgctttgtgaaaggtctacttgactcaaacgatttaccacttaacgtgtcgcgtgaaattttacaagacaacaaagtaacgcaagcgatccgtaaaggttgtacatcacgcgtacttaaaatgcttgagcgtatggcgaaaaaccgtgaagaagattaccaaacgttctggaacgagtttggtcaggtgttaaaagaaggtccagctgaggatatggcaaataaagaagccattgctaagctactgcgtttctcttctacacatactgacgaaagcacgcaaaatgtatcgcttgaacaatacatcgaacgtatgaaaccagagcaggataagatctactatgtggttgctgactcatttgctgcagcgaaaaactcaccacacttagaaatcttccgtaagaaaggcatcgaagtattgctattaagcgaccgtgttgatgagtggatgatgagctacttaacagagttcaacgaaaaatcattccagtcaatcacccgtggtgacttagatttaggcaacatggatgacgaagaaaccaaaaaagcgcaagaagagtcagaaaaagaagtagcaggtctagttgaacgtattaagtcagcacttggcgacagcgtgaaagatgtgcgctttacgcaccgtctaactgattctccagcatgtgttgtagccgatgaacacgatatgagttcacaaatgcaaaagttaatggaatctgttggtcaaactgtgcctgagcaaaagcctatttttgagcttaacccagagcatcagcttgttaaacacttaaacgttgagcaagatgaagacaagttcagccagtggtcacatgtcctgcttgaccaagcattattagcagagcgcggtactctaaaagaccctgcaggctttgtaactcgcttgaacaagcttatgctagatttaagcaaataagcgttttagcgcaatgagttggaaaagggagcagtgctcccttttttattgctgctaatataggcaattggtataagttacttgaggtatagcctcagttgtggaagaattcaggctctaagaacaaaactccactgatcgaccataatttaagattagtatcacacagaggacaatgatatgcgcattattcttttgggcgcgccgggtgcaggtaaaggtactcaagctcagtttttgatggacaaatacggtattccacaaatttctacgggcgatatgctgcgtgcagcaatcaaagaaggtacaccacttggtcttgaagctaaaaaagtaatggatgcaggtcaattagtatctgatgaaattattattggtctagttaaagagcgtatcgctaaaccagattgcgaaaaaggtttcttactagatggtttcccgcgtactattcctcaagctgatgcaatgaaagagaatggtgtggtggttgatcacgttattgaatttgacgttgcagacgaaattatcgttgagcgtatgggcggccgtcgtgtacacccaggttctggtcgtgtttatcacgtagtttataacccacctaaagttgatggtaaagatgacatcacaggtgaagacctaatcattcgtgatgacgatactgaagaaacagtacgtaagcgtttaggtatctaccacgaccaaactaagccattagttgattactaccaagctgaagcaaaagcaggcaacactcagtaccataaactagacggtacccaagctgttgaagctgttagccaacaacttggtgagctattaggttaattaaccttttagattcattaataaaaaaaccgcctcagggcggtttttttgtatctgtttaactgtcttctgatattacagtttcttcaatgcggcaatagcaccgtcgtaatcaggctcttttgagaggttatcgactagttgcttgtaaacgatgttatgttctttatcgagcacaaatactgcacgagttaataagcccatatctttgataattaagccgtagttcttaccaaagtcacgccatacagaatcagataaggtgacgactttgtcgatattttctgctttacagaaacgtttttgtgcaaacggtaaatcagcacttaatgtgagcatagctatgttcgggtactctgcagctactttttcattaaagtgtttggtttgaatgctacacacccccgtatccaagcttggtacaacgctaagcaaaacagcttgaccttgataattgtctaatgtgacaggtgtaaagctatcatctactactttaaaattaggtgctttttgaccgacttcaaccccttgtcctagtagggtgactggctttgactgagctgataccttaccagcatcaagactattttctggtaagtcatttgcgtaactaaacgtacaaactgcactgagtgcaaaaataagtgggcgtaacataatataattccttcaaattaacgcatttaagctgagtgtattatactcatctaattgctccaaggtttactctaatttaaaattgtaaaaaacgagcagtttgattaacatgtgtccgtgccgctattttttatgaattaaaataagaataaagttagcactcttaaggatggctagtaaaaaagtgtgggtttagagagagtatatgtcaacatcggtattagtttgtgatgattcaaagttagctcgtcggcaattagcgcgctctttacccgatgattgggatattaaaattgagtttgctgaagacggtgtgcactgtattgagcaaatcaaaaaaattcagcctgaaatactatttcttgatttaaatatgcctgaaatggatggctatgaagtacttcaagccattcaagaccaagatcttcatgtgcttactgtggttgtttcaggtgatatccaacctaatgctcatcaacgtgtgcttgagttaggcgccattgattttattcaaaaaccttgctctgcagaaaagcttgctaatatcattgaacatcatggtattaaagacaaagccatgcgtgagcgtctatcacaccggctgggcgaacaagttgaccccgatgtacgtgatatctatcaagagcttaccaatgttgcaatgggacaagcaggggacttgcttgcacgcttactgaatgtgtttgtaaagttgcctatcccgaatgttaatatcctagaagttaatgaactagacatggcactgcgttctattgatgccaatgcgactacctctggagtttgccaaggctttataggcggcggtgtttctggtgaagctttgctgctgttaaatgactcaagctttaaagaaattgcgtcacttatgaattacgaaggtgagcttaacaacaagattgagcttgagttgctaatggatgtgagcaatattctgatcggggctattttaagtggtctttcaaagcagcttgatatgcgctttagtcaagggcaccctgtggttctgggtcaacattgtgatgtgtctgatttggtaaaggctaataaatctcgctggcaacgaacgctggcgattgagatcagctatggcatcgaaaatcataatattaattgtgatttaatgctgctatttactgaggattcgctcaaaaccttaaaatacaaagtcgcttatttactagaagattaaactatgcctgcatctgattttaatatgaatgaactccattggttaatggatatgtttaatactgttgatgtaggtcttgtggtgcttgatagagactacaaagtctgcatttggaatgggtttatggaaaaccattcaggcttgttaccaagtgccgtgaaagacaaagatttgtttgatttgtttccatcaatagacgaaaaatggttccgtagcaaatcagagtcagtgttcattttaaataatcgctcttttactatctgggagcagcagccttatattttccgcttcaaaaattaccgcccaattactggtaaagcggatcatatgtatcaaaatgccacctttattcctttaaccacgaccactggtgaagtgtctcatatctgtatcattatttatgatgtaaccgatgaagcggtaaataaaaaagagctagaagaagccaatagtaagcttgagaaaatgagtcgaactgatgcccttacaaaattaacgaataggggatattgggaagaaaaactgcgtaaagagtatatgcgtatcgtacgcagtggcggctgcagtaccttattaatgtttgacattgaccactttaaaaaggtcaatgatgaacacggtcaccgtggcggtgatgaagcgctgcgtcacattgctgatttacttagaaaaacattacgtgaaactgatttggcaggtcgctatggtggcgaagagtttgcagtaactttactggatactgatctcgatggtgcgcatatttttgctgaacgtctgcgttcaatgattgagaactcgtcaatttattttggtgaaaaacaaattcagttaaccgtcagtattggttttgcttgttttgacgaaaagttcgatcgttatgaaaagtgggttgaagctgcagataaagctttatatcactctaaagaaaacggccgtaataaagttacagcgtattcagatttataacttaacggaaaagggcgaaacttcgcccttttttacactccaattggtggtaatacgagaatatctgtttttaacagtttcatgaccttctcagcggtattaccgattaaatgcccttttatgcccgtgttacccactgaccccataattactaaatcagcattaagttttgcggcgacactaggtataacttgttcaaccaccccagctttaattttgagttgctcttttaaattatgagcttcaattagtgcacgttgcgcaaccggtaatttttcataagcattagttacctgctcatcagaaaaaacaatccctaaatctcgcaagaaaggcgacacatggacagtatagcaggcaaaaaattcgctctgataattctctgcgaaggcaaggccggtttttataattgcttcatttaaacagtattttgtagctttctcactacctaaatcgagcgcggcgagtacattggtattgttacgccacttgttgtcagcagctaggtaaagaggcagcgggctaaatcgaataagctgccaatcaagctcgctaaattgcgtttgttcatcaatatggcgggttttaattaccatctcatagtctgaggtggtcacttcgttagcaagccactgcacggggctctcgtgccatagtgtttgtaatgtgtaactaccgacttctaaatagtcattaattagcggacttaatgaagtacgcagtttcgctaactctttatcttgaatagccaaagcttcatctggcggaagagaaaataaaatgctactggtgtcttcatagctaaaagcaacaatatcaatatgcttaacccctttagctttttgtttagcgtgtaataacgacgtttttgcatcgtcgacagaatcgatgataaccagtaactttttattcattcggttcactctgtagtgtgtcgggcatcactttttgggcattcacccagtagtgacacttcccctgttgaagactcttgttccagttttaccttaaagccccataacctgtaaaggtgttttaatacttcatcttttgagtttgctaaggggatattgttatgtggtacatagcgtaaggtcaaagagcggtcacctctaacatcaacatcgtaaacttgaatattgggttcgtggttacttaaattgtattgcgctgacaaactttcacgtacttggtgataacccatttcatcatgaattgcacccacatttagggtgggttctttttcatggtcaataatagtaaataacttaaaatcgcggataatttttggcgataagaactggcttataaagctctcgtctttaaagttttgcattgcaaagtgcagcgtttctaaccaatcactgccggcatactccggaaaccatcttttatcttcctcggtcgggttttcacaaatacgacgaatatcaaccatcatgttaaaaccaagggcgtaaggattaatccctgaataataattactgttgtaaggcggttggtacacaacattggtgtggctttgtaagaactcgagcataaaggaatcagtgagcttaccttcatcatacagatggttcaaaatggtgtaatgccagaatgttgcccagccttcattcattacttgagtttgtttttgcggataaaaatattgcgaaattttacgcacaatacggattacttcacgctgccatgattcaagcaatggggcatttttttcgatgaaatataaaatattttcttgcggctcttcaggaaaacggcgctcacgttttttagactcttgttgcgaggtaggaatagtgcgccacagctcattcacttgtgattgtaagtaatcttcgcgctcttgctggcgtttttgttcttcataaagcgaaatacgttgtgggcgcttatagcgatccacaccgtaattcattaatgcatggcatgagtcgatgagattctcgacctcattaatgccatatttttcttcgcatttggcaatgtagttttttgcaaataataagtagtcgatgattgagctggcgtcggtccaagtcttaaataagtaattacctttaaaaaatgagttgtgaccatagcaggcgtgggccataaccaaggcttgcattggcagtgtgttttcttccattaaataggcaatacacgggtctgagttaataacaatctcataagcaaggcccatttgcccacgtttatagttttgctcagtttgaatgaattttttaccatacgaccagtggctgtagccaattggcatacccacactcgaataggcatccatcatttgttctgcagtgatcacctcaatttgattcgggtaggtatcgagtttataaattttcgcgacccgttcaatctcagtttgatactctgctaataaatcaaatgtccaatcaggaccgtcgctaatacgtttatcggccatactttacctcactcgcaaggctatgcggcgccttgctgctgacgattctttttaaataattcacggaaaattgggtaaatgtcctcaacgccacgaatatgttgcattgcaaagttgtcgtgggtttgcgctattgattgatactctcgccataagctttggtgagcacgggctgtgatttcaatatacgcatagtagcgtactgcttttagaagcttgttacgtaaaatttctccacaatttggtgagtcatctgcccagttgtcgccatcagacgcttgcgctgcatatatattccactcttcagggttatagcgttcagcgatgatttcgttcatcagttttaatgcgctggagacgatggtgccacccgtttcttgagaatagaaaaactcttgctcatcgacttctttcgcttgggtatgatggcgaatataaacgacttctatatttttgtagctacgggttaaaaattgataaagcaaaatataaaagcgttttgccatgtctttagtcgcttgatccatcgagccggacacatccattaaacaaaacatcacagctttgcttgtggggtgtggtcgtttttcataattacgaaaacgtaaatcgtaattatcgataaatggcactgctttaatgcgactttgcagctcctcaatttgccgttcaagcaaagcgatagccgctttatctggctgatcttcggcttttaaaagcgctaactgaccttcaagttcagcaagatggcgctttttgccagcagtcattgcaactcttcgcgcaagtgagccctgtaaagagcgcacaatatcaatgttgcttggcatgccatcgttacaaaaaccggctcgatgggttttcatttgcaccagtttatcgagctggttttgttgcaagttaggcagttcaagatcttcaaacaataagtctaagtattcatcttttgaaatagagaacacaaagtcgtcttgtccttcacccgaatcactggcttcaccctcgccagagccaccaccttgaccgcctccttgcgggcgcttaattttgtcgcccgtagagaattggtcattgcctggatggatctgttcacggtcaccaccacgtccttgatgaaaaataggctcactgatatcacgttgcggaatagaaatactctcaccgctggtggtatcggttacgctacgcttattaatggcatcagataccgcttctttaatctgttttttgtaacgccttatgaatcgttgacgattcaaggtacttttgttttttccattcaggcgtcggtcaataaaatgcgccataacaacccccttaaaacaaacgttttttactgcgattttctaacgcgtaaataccattcagaaagtaaacgtacttgtttttgggtatagcctttctcaaccatacgattgacaaagtcttcgtgttttttctgatcttcagccgaggttttcgcattgaaggaaataaccggcagcagatcttcggtatttgagaacattttcttctcaataactgtgcgaagtttttcgtagctggtccaaagcggattcttgccttggttgtgggcacgcgcccgcagtacgaaattaactatctcattacggaaatctttagggtttgaaatacccgcaggtttttcaatcttctcaagttctgcgttaagagctgcacggtcaaataactggccggtatctgggtcacggtattcttgatcttggatccagaaatcagcataggtgacataacggtcaaagatgttttgcccgtattctgagtaagattctaaataggctgtttgtaactctttaccaataaactccacgtattgaggaatgaggtagccttttaagtgacttaagtaacgctcttcaacatcggctgaaaactgttcacgctcaatttgttgctcaagcacataaaataagtgcacagggttggcagccacttcggtagtatcgaagttaaatacccgcgacagaatcttaaacgcaaagcgggtagaaagcccagtcatgccttcatcaacacctgcgtagtcgcggtattcttgatacgacttcgctttcggatcggtgtcttttaagctttcgccgtcatacacccgcatttttgaataaatgcttgagttttctggctctttcatgcgtgaaagggtggtaaattgcgccagtgtttttaatgtaccgggtgcacaaggggcgtcatgtaactcactattttcgagtagtttattgtaaattttaacctcttcagaaacacgtaaacaataaggtactttgacgatgtaaacacggtctaaaaatgcttcattgtttttattgttcttgaatgtttgccactcagattcattagagtgagccagaatcataccattaaacggtagggcgctaatgccttctgtgccgttgtagttaccttcttgcgttgctgtaagtagtgggtgtagcaccttgattggtgctttaaacatttctacaaactccatcaagccttggtttgctaaacaaagtgcgccggagtaggcatacgcatctgggtcgttttgtgcaaagtgctcaagttggcgaatatcgactttaccgactaacgctgaaatgtcttggttgttttcatcgccgggctcagttttagcaatcgcgacttgatttaaaatagatgggtagcgcttaaccactctaaattggctaatgtcaccattaaattcacttaagcgttttgcagcccacggtgacatcaccgtttttaaataacgcggtttaatgccatattctttctctaaaagctcggcgtcttcatttggatcaaataaggctaaagggtggtcgttaacaggtgagcctttaattgaataaataggtacttgttgcattaagtatttaagtttttcagcaatggatgatttaccaccccctacaggaccaagtaaatacagcacttgcttacattcttctaagccttgcgcagcatgttttagataagagacgatttgctctatggcatcttccataccataaaaatcgtgaaatgccgggtagcgtgcaactacgcgatttgaaaacagcctgcttaagcgcgcatcggttgatgtgtcgataatttctggttcgccaatagccatcaataaccgttcaggtgcgctggcataagctgatttatccttcttacagatctcgagaaattcctcaatactgtattcttcttcttgcgctgcttcgtatcgtgattggtaatgctcaaaaatactcatagagacctccgaaaacccgctaaaatgacgtgtaattagattaagagaaaagcaaaggttaattaaagcttagtcacgattttgaatttttgcgcaagaaaattaagaatttaattgaaaaaagctcatcctgattaggctttttgggtgagtggttggctgcgggtcagaaggggcgtgcaaagggcaataaaaaagacgccgaagcgtcttttttgattactgttagtaacagaagattaagcgaagttagcgttcgcgaagtcccagttaactaatgcccagaaaccttttaggtaatcaggacgtacgttacggtaatcgatgtagtaagcgtgttcccacagatccacagttaggattggagtaacaccttcatcagttaatggcgttgcagcatttgacgtgtttacgatatcaagtgtgccatcagctagtttaactaaccaagtccagcttgaaccgaagttgtttactgctttgtcgtttaacgcttctttgaatgcgtcgaaagaaccccatttagcgttgatcgcgtcagcgattgcgcctgtaggctcgccaccaccgtttggagataggctgttccagtagaaagtgtggttccagatttgtgcagcattgttaaatacgccaccttctgaagaacatacgatttcttctaaagatttgttttcgaattctgtgcctgggatcagaccgtttaatttcacaacgtaagtgttgtggtgtttaccgtggtgaaactctagagtctcttttgaaatatgtggctctaatgcatcgattgcgtatggtagtgacggtagttcaaatgccattttttatctccatcttcttggttgatagtccactcagttataggtaatagcaaggtaaacagcgtacttccctataccaagtggtattatagtgttactataattgttgagtattttactcaagttttagcaaacagcaatgctattgctaaagactattttaaattgtggctacgaatgccgatttaagttatatatctgaggccactgtgaaactttttcaaggccaatgtagtaagctaatgtcttttttgaggttgtaaatggaaaccatcgataaaattaaacagcaaatttctgaaaatccaatccttctttacatgaaaggatcaccaaagttacctaactgtggtttttcttcacaagcatcacaagcacttatggcatgtggtgagcagtttgcttacgttgacattctacttaacccagatatccgtgcagagttacctgcatacgcaaactggccaacattcccacaattatgggtagaaggcgagcttatcggtggttgtgacattatcatcgaaatgtttcaacgtggtgaattacagccactaatcactgaaacagctgcaaagtacaaagaaaaagacgctgaataattatatttagtgtagaaaaaagccgcaaactgcggctttttttatagccattcgcttaagattagtaagcggtggtattacccgggtaataaaacatgcacgcttaatccaccttgctcgcggttatgcaagctaatttgcccgtggtgcgcttcaactatttctctgcatagcgctaaccctaaaccactgccagttgctttggttgagtaaaaggggattagtgcgttggccattacagcctcactcatgcctttgcctttatcactcactgtgatgtgtgtgccacttgtttcttgttgcacagttaagctgacatcttctgggtttgcaccggattcataggcattttttaataggtttataagtaactgctcgagttgggtatgatcagcgtcagttgttacacgttcatcaagtgaaacctcaacctgccactgactttttaattgctcaatcagtgtcggccagttaatcgtcgacagttgaggggtgggtaacttagcaaatttgccatagccttgtacaaactcattaaggtgttttatgcggtcttcaatggtggtaaatacccgttttaagcgtggctcgtcgacttcttttgttaatagttgcgcgctatgaagcatagatgacattggccctagtgagttgttaagctcatggctaatgatacgaatgacttttttccatacttctacttcttggcggcttagttcgcgggtcagctgtttaaaaacaaacagttggtgaaactgattattaagcaataatcggcctgttgccatatgccaagtttgtgattcttgatctgatttatcgagggtaaataagccatcaacgcctttgtgaatggcacgcgttaattgctcgcagcttgaatctaataagttttcgagcttggcaccttcaagggctgacttagcatcgagtaagctacgagcactgtggttgctatacacaataaagccttggtcgttagtcaaaagcacagcttgtggcgagctttgcagtactttgtcgagcattagctcgcgctgatatatccattgtttttcttggcgaagctgttttgcggtttggttataaagccggcataaatcacctagctcatcgctgccatcataggctaatagtgtagccagctcgccatctttaaaattaagcaacccggtttcgagtgagttcatgccatcaataagcggggttgataattgcgcggcaaaaagtccgctgatcaaagcgcaagcgagcagggctaataggctgtaaaacaagcttatacccgcaaagtaacaaaccaacataagtggcaatgcagacgcggccatgcatagggttatgattttatatcgaaacgaaaaacgcattagtattcaatcttaaatttatcaagcctgcgataaagtgcttggcgacttaggccaaaatggcgagccactttagcaatcacacctttgtactcgcgcatggcaagttcaatctcttgtttgttaggctctgctcttgtttgtgatgggctgtttgtttcaacttgtaagccaaaatcagcaagctcaatcacccctgtgggttttaaaacgccagcgcgtttacaggcattttcaagctcacgaacattccccggccaactatgagccagcagggctttttctgtacttaacgacagggtgcgctcaggtaagaagtgtgcgaccaaagctaaaatatcatcagggcgatgagctaggcttggtaaatttaactcaatcacatttaagcggtagtaaaggtcttcacgaaattgacctgttttaattgcatggcttaaatcttcattggttgctgaaatgaccctaacattcactttacgcgtttgtgttgaacctaagcgctcaaattcaccggtttgtaaaatgcgtaatagcttcatttgcccagaaagtggcaagttaccaatttcgtctaaaaataaggtgccaccatcggccgcttcaaaacgaccaatgcgctgtttggtaatgcctgtataggcgccagcttcggcaccaaataactcagcctcaataagctcgctaggcagagcgccggcattaacagtgataaagggtttatctgctaataaagaattggcctgaattatgtgtgcaatgcgttctttaccgctgccgttagggcctgtgatcagcaccgaaatatccgatttagcaacttgaatcgcaagattaacaatgtgctccatagcggtacttttatatatcaaacccactaaatttgctcgttgcacagatgcgtcacgttcttgctggtggcgggtaaaggtttcgttttgttgttttgctttacccagctctattaggttatttacacaggtaagtagcttggcatcgtcccatggttttggtaaataatcagcagctcctgctttgacaagttcaacagcagtagaaagctctgtccatgcggtgatcaaaataatcggaaggtgaggattaatgtctcgtaaggcatagaaaagcgctttgccttcttcgcctgaagtggtgtcggcggtaaagttcatgtcttgaataacaagtgcaatgcgttggtattgtacggcctgaattgcctcaaacgggttgcttgccgtaacaacatcaaaatcgtgaatttcgagtaacaacgataacgcatccaaaatggctgggttatcatcgacgataagtattttttccatattattgttttagttattttcctaataagggtgcaagatgaatgctacactgttaatccagtgtagcataggttgggagaactaaattgttcgagttgcaatgctcggtgagatattcgccgcccgttttgcaggtgcaagtactgctaataaactcataacgaacactgccagcgctgtagcaagcacgtagctaatatcaagctgagctattgaaaagtgctgcatgagcaactggcctaaatacacggcagcaatcacaccaatcactaaaccaacaacacatatcatggcgttttcaactaagaagtagctgataatggctgactttctggcacctaaagcgcggcgagtaccaatttgctttgtacgcttactaatattgaacagcgttaggccgaaaatacctagggctgttaccaacactaaaatagtaattagtacaatcagcatgcgcatcattaatgtatcttcagccatgtatgactctttatcgtcatctaagccacgaatgcgagagataacgcgtttgttgtagttttttagcatggcttcttcaacacggttcatgactgattgacgttgaccaggctctgttctaactacaaagcgtgcatttgttccaggcttaataaaaggcagcagtgctacgttatctggacggctgtctttaagccatgggcctttcattagatcaataacaccaatcactttcattggaatgtcaccaaaatagacagtttgacctaaaccattgccgtcagggaacagctcatcgagtagggttttagtgacaactgttacttttgaaagctcatcatagttatcggttacgatcacttcgtcttcggtatagttacgcccagcaatgagtttaacgccataggtattaatgccatgctcatcgataaacatgtaagagctacgtgctgatttactctcttcaggtgctggctttaaactaaaatctgacgaagaaccactgcccgaaagcggtgtgttacttgaataagcagcatcaacgaccccaggtatttgacgaagcatggcttcatcaagctcatattgctgagacggcgacacatctttgccaaacatcatgacattaaaaacaaaaatgtcttgttcagggtagcctgtttcttggcttaaatagctaattctgtcttgaataataaacgccgcgttactaacaattgcagtggtgatggcaatttggatcagtaataaaatagcgccaacttttgagcggcataaggcgtgaaagataggtttgatttctaacatggtgtcttccttattggctcttaaggtaaatagcagggttggttttacacaccagccaagcagggtacagacccgctataacacaggtgctaattgcaatcacaggtgcgctgagtaacatgcttaagtccatagtggctaagctttggtagtagctatagctttgacgtacgcctaataaccccacttgcgccaaaataattccgaagatgccacctaagaaacctaacatggctacctcaacaatatgttgaaagaatatttggcgtttactggcacctaatgcacggcgtacaccgacctcaggagcgcgacgtaaaaatttcgcaagtaacaagcctaagatgttggcaaggcataccgctaaaaacataaagcttaggccaaccagaatttcgttgtcttcgctgacaacattgttgtacttcatccactcatttacatcgcgtaaggtggcggttaatttttcacggttaaaacgacctagcttctgttgttcttgcatataggccattaaaaagtcttggtaagcttgcttttctgcgggtgtttttagttcaacccaaaactgtaaccacaccatttctgaattgagcttgtcattaaaggtattggttttttcgtgcttccaaccattggtattaccccagttttcaagctggcgtgctttcattaggctaaatggtaaaaatagttgttcggttttattaaatgcaccgttattcaagtcatagtatttggtagtgatatcccaatcatcaatcacgccaattacttcgtagctggcatcatcgaggtacaccattttgcctaccgggttttcaccagcgaataatttgtcgtttaattctttattgataaccacgacaggtgctgcatcggcttcttgttgcgtgctccaaaccccaccataaataaacgataggttaaacatatcgaaaaaatcaggggtggttagacgagcttgaccaataaatggtttaactgtgtctgagtctaaataaaccgaaaaacccgttctaaccatagtgacacgcttgccacctgctttggcctggttaaggttgactgcatcttgataggttaattgcagtggcatgttatcgattgtccaccacgtacggccttcatccatggtttgtaactgcacagagtaaagatcgctacttttttcaggaatagggtctgccgacatcatgtgatacacagataaacttgtcatggttacgccaataccaatggcaatagccagcaccattaaaaagcttactagtggcgtgcgcttaaagctgcgccagcttaaatctaaataatgaaggaacatggttacactccagccgctttaaggttttgggtgccttgatacaaagtgaagtctgcgagttggccatcaacaacttgaatattacgaggtgctctgcgggcaagctctggatcatgagtaaccatgatgatggttgcgccatcacggttgatttgctcaagtagctccattacttgacgcgccattaagctatctaaattaccggttggctcatcggcaagtaaaaagcgcggttcacctgcaagagctctggcaatagctacacgttgttgttgaccaccagaaagttgttgcggtaagtgtttagcgcgtgaggctaaaccaacttgctctaagcattgctcgattcggcgtttacgctcggcggctttgataccgcgataacgcagtggtacttcaatattttcgtagaggttcaaatctggaataagattgaagccttggaaaataaaaccaattttttgattacgtaagtcagcacgctggttgtcatttaatttacccacatcaataccgtctagcatgtattgaccttcgctaaacggctccaacataccggcgatgtttaaaaaggtggttttacctgagccactcgggcccgttacggcaataaattcaccttcttctacttgtaggttgaagtcgcgaagggcgtgcgtttgtaccatatctgtttgatacactttgctgatgttgttcattgtaagcatgttgattattccttttatttgttagcgtaaaaccagtgtgggtgcttttttaaagcgatcgtaatttgagataattaacttatcgccaggctctacgccttcgataatctcgacagcattgatactgcttgcaccggtttttatatcgattaaataagccatgtcaccgtcaactttataagcatgggtgccaccttgttgtaagaatgcgccgcgttttacctgcaatacattgtcgcgattctctaataaaatacgtgcggttaagcgttggttttggcgaatgccagaaatttcattgtcaaagcgtacgcgggtagtgacctcgcgattattcacttcaggcgaaatagccgatagggtgcctgttacatgacgtgcgcctaaagtaagttctacttgcataccaagacctagctcgttggcgtagctttctggtacttgcagttctgcttcaaagttacttaaatcgaccaatgtcattaacggttggctttgtgttaccgcctctttttgttgcactaataagttacccacaatgccgcttacgctggctgtaatggtgagttcatttacttgccttagtaagtcatcaacaatcaattgctgacgcgccagatcgcgttctgctgcttttagctcaaatgcgagggtatctttagctaagctgacttcttgctcagcatgcttataagaaagcttggcacgagctaaatcatcaacggctttttctaaatctatttggctgatcaaatgtttctcgatagagattttagcgcgacggttttctcgatctgcggcatttagttctacctgagctaaatctagtgctttggtaaggctcagcttttgcctgcgcgcttcaagttgcttgcgttgtaattcgccttctaatcgcgctaatactgattgttgctgttttaattcgttggttagctcagggctggtaacggttgcaatcacttcatttacttcaacgctatcaccggcttttacttttaaatcgacaaagccacgttcagggctgtaaacctttggcgcattggctgcaactattttaccgctcgctgccacatctctggtgagcgtcttttggctcacttcactaatttgtaggcttgctgcatcaaccgaaatgctgccatcgttactggcgaacaaagcttgaaagccaagcgcaccaacaagtattacacccgctgctagtataagtggtttttttatagtgtttttcttagccacggtaatatcttgggcgctggtatccttaatcatcataactccttacgattctcaaaacacacaatcatgaagccaacggcaagcatggtaagtggagaagccataaacaaactgatagtgaacattttgaaatcctcaatttcgctgatgtcttatctataccagtagcgtgccaaaatttaatttattgatttttaatgcattttattttatttgatgagttacttcctgtccgcggacagaaaaagtgtccgctgcggacacttttaaattgctgtttgttgacgcataggtaaagaaactcagatattgcgactaaggtagtctgctcagatacatagtttgtaactatgctaaagccaagagtaaataatgatgcaactgtgctaggtgagaccccataaaaagctgcattgatattcatagggtgaataattattcatttgttggtgcagtttacgttaacgtaaaggtgcgggtttttagattggttttttacaagttgttaaatttgacaccagtgtcataaaaaaataacggtaaaaatacgtctaaatgtaaaaaaattgcttagtatttaatatgtgccttcaagtgagaaatattcaagaatatgaatatgtattcaaatctctattgactcatggaacaattggcgatagttttgttcgtctgctagcactgtcgcaaaagactgaatcgctagtcgttgtagcaaggggaggggtctatgttatatgactcaaaattagaaaaagataattgtggctttggcttaatagcccaggtcaatggtcaagcgagtcaccgcttgattcgaacagcaatcacgggcttagatcgcatggaacaccgaggcggtatttctgcagatggcaaaaccggtgatggctgtggtttattaatgcaaaaacccgatagtttctttcgtgctattgccagcgaacatgattggcatttaggtaagaactacgcagtcggcatggtatttttaaatgctgatcctgtacttgcacaaacagctaaagatgtgctgagtgaagaacttgaaaaagaaaccttgagtattcaggggtggcgtgtagtgccaacagattcatcatgtttagggccaattgcaaaaaaacaactaccgggctttgaacaaatttttgtgagcgcaccagaaggctggcgtccaaaagatttagagcgtcgcttgtatgtagcacgtcgtcgtgcagaaaagcgcctcgaaaacgatgaacatttttatattgccagcttatctggtttagttaccgtctataaaggcttaatgatgcctgtagacttacctaacttttatttagatttagctgacattcgcatgaccagtgcgatttgtgtattccaccaacgtttctctactaatacacaacctcgttggccgcttgcgcaaccattccgctatttagcgcataatggtgaaatcaatacgattcaaggtaaccgccagtgggctcgcgcccgtgcgtacaagtttgcctcaccacttattcctgatttgcaatcagcagcgcctttcgtgaacgaaagcggctctgactcttcaagcttagataatatgcttgagttgttcttagcgggtggtatggatttattccgtgctatgcgtatgcttgtgccaccagcatggcaaaagaatcgtgccatggatgatgacttacgtgcattctatgacttcaactcaatgcacatggaaccatgggatggcccggcaggtattgtaatgtcagatggccgttttgcagcctgtaaccttgaccgtaatggcttgcgtccagctcgctatgtaatcactcaagatggtttcattacccttgcctcagaagtaggtatttgggactacgcaccagacgaagtggttgagaaaggccgtgttggccctggtgagctattagttattgatactcatcaaggtaagatttggcattcagatgagattgaccaagaccttaaatcacgccatccatataaagcatggctagaagcaaacgttaagcgtttaacaccgtttgagcaactctcagagaaagatgcgggcaaccgttcatttgatgatgaaactctgcttaagtaccaaaaaatgtttggttacaccaacgaagaacttgatagcgttattcgtgtaatgggcgaaaatggtcaagaagcaacaggctcaatgggtgatgacacgccatttgcggtactttcagaaggtcatcgttcactgttcgattacttcagacaaaaattcgcgcaagtaaccaatccaccgattgatccacttcgtgaaaatcacgttatgtctttagctacttgtattggtagtgagcaaaacgtatttaatgaaacaacaggccatgctaagcgtttacaatttgatacgccaattttgatgtatgcagacatgcaacagcttatcaatgctgacgatgaacattacagctattgtaaaattgatattacttacaccaaagaagaaggcttagagaaagcgatcacccgtatctgtgatgaagcgcaagcaaaagcagcgtcgggctgtgtaatgcttattctaagtgaccgtaactttagtgaaacgcacttgcctatcccggctgcaatggcggtagggtctgttcaaaaacgtctagttgataacaacttacgctgtgaatcaaatatcattattgaatcgggcagtgtccgtgatgcacaccaatttgctgtattactaggctttggtgcaacagcaatttatccgtatcttgcgtatgaatcgttagttgcgatgactgacaaaaagatcttaaacaagagctactgtgaagtaacccttgcttatcgtaatgcgataaataaaggtctatataaaatcatgtcgaaaatgggcattagtactgttgcttcgtaccgctgctcaatgttatttgaggcagttggtttatcagatgcagttgtagaaacctgttttaatggcgtggcaagtcgcatcaaaggggcttgttttactgactttgatgatgaccaacgcaaactacataagttggcctttagtaaacgtaaattattaagccatggcggcttattaaaatatgttcatggtggtgaataccatgcctataacccagacgttatccaaacactgcaaaaagctgtgcgttctggggaatatagcgactatgtagcgtacgctgatttagtaaataaccgcccgatcaccaatttacgtgacatgttggcagtgaaaattcctgaagctggtgtgaatatcgatgacgttgagccggcaactgagctctacaagcgttttgactcagcagcaatgagtattggtgcgttatcgccagaggctcatgaagcgctcgcgattgcaatgaaccgtttaggtggttgttcaaactcaggcgaaggtggtgaagacaaacttcgctacggcacagagaaaaactcgcgtattaagcaagttgcatctggccgctttggcgtaacaccacactacttacgtagcgctgatgtaattcagattaaagttgcgcaaggtgcaaaaccaggtgagggtggtcaattaccgggtgaaaaagtaacgccatatattgcaaaattacgttactcggtaccaggtgtgaccttgatttcacctccgccgcatcacgatatttactcaatcgaagatttagctcagcttattttcgatttaaaacaagtaaatccagatgcactgatttcggtgaaactcgtttctgagccgggtgtaggtactatcgcaacaggtgtagcaaaagcgtatgccgatttaatcaccattgctggttatgacggtggtacaggtgcaagcccgcttacttctgttaagtatgcaggaagtccttgggagcttggtcttgctgaaacccagcaagcgctagtagaaaatggtttacgtcaccgtattcgtctacaaactgatggtggccttaaaacgggtctagatatcatcaaggcggctattttaggtgctgaaagctttggctttggtaccggccctatggtggcacttggttgtaagtacctgcgtatttgtcacttaaacaactgtgcgaccggtgttgcaacgcaagacgatacgcttcgtcaaaagcattatcatggtctgccagaaatggcgatgaactactttaagtttattgccgaagaagcgcgccaaataatggcaagcttaggggttactcgattaaccgatttaataggtcgtttggacctgcttgaagccattgaaggcaaaacagagaagcaaaagaaagtagatttgtcatctgtggttgcggtaccaaataacccaactggtgagactctgtattgcagtgcacctaatagctcgcattatttaggtcagctaaatgaaaccttgcttgaaaaagcaaaacaagcgattgatgaaaaatcgggcacctcattggtaagtcgtatttgtaatactgaccgctcagtgggtgcgatgttatcgggctatattgcctctaaacatggtaaccaaggtatggctgctgatcctgtctctattgagcttcatggtacagcgggtcaatcatttggtgtatggaatgctggtggccttgaaatgacattagtaggcgatgcgaatgactatgttggtaaggggatggctggcggtaagctggtaattcgtccaccgctgggttcatcgttcgaaagccacaaagcgactattgccggtaatacctgtttatatggtgctacaggcggcaaattatttgcggcaggttgtgcaggtgagcgttttgcagttcgtaactctggcgtacaagcggttgtagaaggtgttggtgacaacggctgtgaatatatgaccggtggtgtggtttgcgtgcttggcaaagtaggtatcaactttggtgcaggtatgacaggtggttttgcttatattcttgatgaaggcaatgactttgaaaaacgcattaaccctgagcttgttgaaattgtcacgctcgaagggttggcatcacaccaagaacatttacgcggcctaattgctgagcatttagagcttacaggc

(The sequence listing continues in the following parts.)
